(19) United States
(12) Patent Application Publication
(10) Pub. No.: US 2023/0226183 A1
(43) Pub. Date: Jul. 20, 2023

(54) COMPOSITIONS AND METHODS FOR ALTERING GAMMA DELTA T CELL ACTIVITY

(71) Applicant: THE REGENTS OF THE UNIVERSITY OF CALIFORNIA, Oakland, CA (US)

(72) Inventors: Murad R. MAMEDOV, Oakland, CA (US); Alexander MARSON, Oakland, CA (US)

(73) Assignee: THE REGENTS OF THE UNIVERSITY OF CALIFORNIA, Oakland, CA (US)

(21) Appl. No.: 17/758,866

(22) PCT Filed: Jan. 15, 2021
(86) PCT No.: PCT/US2021/013736

§ 371 Date: Jul. 14, 2022

Related U.S. Application Data
(60) Provisional application No. 62/961,563, filed on Jan. 15, 2020.

(51) Int. Cl. A61K 39/00; C12N 15/90

(52) U.S. Cl. CPC A61K 39/4633; A61K 39/4611; C12N 15/907; C12N 2310/20

(57) ABSTRACT

Provided herein are compositions and methods for altering sensitivity of target cells to killing by γδ T cells.

### PRIOR RELATED APPLICATION

[0001] This application claims the benefit of U.S. Provisional Application No. 62/961,563 filed on Jan. 15, 2020, which is hereby incorporated by reference in its entirety.

### INCORPORATION BY REFERENCE OF SEQUENCE LISTING

[0002] This application contains a Sequence Listing in computer readable form (filename: 1325433.txt; Size 1.42 MB; created Oct. 26, 2022); which is incorporated by reference in its entirety and forms part of the disclosure.

### BACKGROUND OF THE INVENTION

[0003] Gamma delta (γδ) T cells play a role in regulating the immune response. In some cases, for example, in some cancers and infections, γδ T cells kill tumor cells and infected cells, respectively. In other cases, for example, in bone disorders or autoimmune diseases, γδ T cells exert undesirable proinflammatory effects. Methods for enhancing cell killing by γδ T cells for the treatment of cancer or decreasing cell killing by γδ T cells for the treatment of bone disorders or autoimmune diseases have great therapeutic potential.

### SUMMARY OF THE INVENTION

[0004] The present invention is directed to compositions and methods for altering sensitivity i.e., increasing or decreasing sensitivity, of target cells to killing by γδ T cells. The inventors have identified cellular factors that influence γδ T cell cytotoxicity against target cells. γδ T cell cytotoxicity can be increased by increasing expression and/or activity of one or more of these cellular factors. γδ T cell cytotoxicity can be decreased by decreasing expression and/or activity of one or more of these cellular factors. In some examples, γδ T cell cytotoxicity is decreased or reduced to treat a bone disorder or an autoimmune disorder. In other examples, γδ T cell cytotoxicity is increased to treat cancer.

[0005] Provided herein is a method of increasing sensitivity of a target cell to killing by a γδ T cell, comprising: increasing expression and/or activity of one or more cellular factors set forth in Table 1, in the target cell.

[0006] In some embodiments, the sensitivity of the target cell is increased in the presence of the γδ T cell. In some embodiments, the target cell is a cancer cell. In some embodiments, the target cell is a cell that is infected with an infectious agent.

[0007] In some embodiments, the increasing expression and/or activity of the one or more cellular factors in Table 1 comprises contacting the target cell with an agent selected from the group consisting of an antibody, a small molecule, a polypeptide, siRNA, microRNA or a drug.

[0008] In some embodiments, the increasing expression comprises increasing expression of the cellular factor of Table 1, or increasing expression of a polynucleotide encoding the cellular factor of Table 1.

[0009] Also provided is a method of decreasing sensitivity of a target cell to killing by a γδ T cell, comprising: inhibiting expression and/or activity of one or more cellular factors set forth in Table 1, in the target cell. In some embodiments, the sensitivity of the target cell is decreased in the presence of the γδ T cell.

[0010] In some embodiments, the decreasing expression and/or activity of the one or more cellular factors in Table 1 comprises contacting the target cell with an agent is selected from the group consisting of an antibody, a small molecule, a polypeptide, siRNA, microRNA, or a drug.

[0011] In some embodiments, the decreasing expression comprises reducing expression of the cellular factor, or reducing expression of a polynucleotide encoding the cellular factor.

[0012] In some embodiments, the antibody used to increase or decrease activity and/or expression of a cellular factor of Table 1 is a bispecific antibody, wherein the bispecific antibody has specificity for an epitope of the one or more cellular factors of Table 1 expressed by the target cell and specificity for an epitope on the γδ T cell.

[0013] In some embodiments, the target cell is ex vivo, in vitro or in vivo. In some embodiments, the sensitivity of the target cell is increased or decreased in a human. In some embodiments, the human has cancer, a bone disorder, an autoimmune disorder or an infectious disease.

[0014] In some embodiments, the γδ T cell is a Vγ9Vδ2 T cell. In some embodiments, the method further comprises administering γδ T cells to the human. In some embodiments, the γδ T cells are autologous γδ T cells or allogeneic γδ T cells. In some embodiments, the γδ T cells comprise a heterologous cell-surface protein that binds to a cellular factor set forth in Table 1.

[0015] Also provided is a method of increasing sensitivity of target cells to killing by a γδ T cell in a subject in need thereof, comprising increasing expression and/or activity of one or more cellular factors set forth in Table 1, in the target cells of the subject. In some embodiments, the subject has cancer or an infectious disease.

[0016] Further provided is a method of decreasing sensitivity of target cells to killing by a γδ T cell in a subject in need thereof, comprising decreasing expression and/or activity of one or more cellular factors set forth in Table 1, in the target cells of the subject. In some embodiments, the subject has a bone disorder, a metabolic disorder or an autoimmune disease.

[0017] In some embodiments, the method further comprises administering γδ T cells to the subject. In some embodiments, the γδ T cells are Vγ9Vδ2 T cells. In some embodiments, the γδ T cells are autologous γδ T cells or allogeneic γδ T cells.

[0018] Also provided is a γδ T cell comprising a heterologous cell-surface ligand that binds to a cellular factor set forth in Table 1. In some embodiments, the γδ T cell is a Vγ9Vδ2 T cell. In some embodiments, the cell-surface ligand is an antibody.

### BRIEF DESCRIPTION OF THE DRAWINGS

[0019] The present application includes the following figure. The figure is intended to illustrate certain embodiments and/or features of the compositions and methods, and to supplement any description(s) of the compositions and methods. The figure does not limit the scope of the compositions and methods, unless the written description expressly indicates that such is the case.

[0020] FIG. 1 provides aggregate data of gRNA enrichment among Daudi cells that survived the co-culture with expanded Vγ9Vδ2 T cells from three different healthy donors. The labeled data points above the dashed lines are positively enriched genes with a false-discovery rate (FDR) of less than 0.1. The biological functions of the genes are described in Table 5.

### Definitions

[0021] As used in this specification and the appended claims, the singular forms “a,” “an,” and “the” include plural reference unless the context clearly dictates otherwise.

[0022] The term “nucleic acid” or “polynucleotide” refers to deoxyribonucleic acids (DNA) or ribonucleic acids (RNA) and polymers thereof in either single- or double-stranded form. Unless specifically limited, the term encompasses nucleic acids containing known analogues of natural nucleotides that have similar binding properties as the reference nucleic acid and are metabolized in a manner similar to naturally occurring nucleotides. Unless otherwise indicated, a particular nucleic acid sequence also implicitly encompasses conservatively modified variants thereof (e.g., degenerate codon substitutions), alleles, orthologs, SNPs, and complementary sequences as well as the sequence explicitly indicated. Specifically, degenerate codon substitutions may be achieved by generating sequences in which the third position of one or more selected (or all) codons is substituted with mixed-base and/or deoxyinosine residues (Batzer et al., Nucleic Acid Res. 19:5081 (1991); Ohtsuka et al., J. Biol. Chem. 260:2605-2608 (1985); and Rossolini et al., Mol. Cell. Probes 8:91-98 (1994)). The term nucleic acid is used interchangeably with gene, cDNA, and mRNA encoded by a gene.

[0023] The term “gene” can refer to the segment of DNA involved in producing or encoding a polypeptide chain. It may include regions preceding and following the coding region (leader and trailer) as well as intervening sequences (introns) between individual coding segments (exons).

[0024] “Polypeptide,” “peptide,” and “protein” are used interchangeably herein to refer to a polymer of amino acid residues. As used herein, the terms encompass amino acid chains of any length, including full-length proteins, wherein the amino acid residues are linked by covalent peptide bonds.

[0025] The term “increasing sensitivity” refers to increasing the target cell's responsiveness to killing by a γδ T cell. An increase in sensitivity for example, can be an increase of at least 10%, as compared to a reference control level, or an increase of least about 20%, or at least about 30%, or at least about 40%, or at least about 50%, or at least about 60%, or at least about 70%, or at least about 80%, or at least about 90%, or at least about 100%, or at least about 200%, or at least about 300% or at least about 400%. An increase in sensitivity of a target cell can be an increase of at least about 20%, or at least about 30%, or at least about 40%, or at least about 50%, or at least about 60%, or at least about 70%, or at least about 80%, or at least about 90%, or at least about 100%, or at least about 200%, or at least about 300% or at least about 400% as compared to a target cell where expression and/or activity of one or more cellular factors set forth in Table 1 is not increased. An increase in sensitivity can result in an increase in target cell killing of at least 10%, as compared to a reference control level, or an increase of least about 20%, or at least about 30%, or at least about 40%, or at least about 50%, or at least about 60%, or at least about 70%, or at least about 80%, or at least about 90%, or at least about 100%, or at least about 200%, or at least about 300% or at least about 400%.

[0026] The term “decreasing sensitivity” refers to decreasing the target cell's responsiveness to killing by a γδ T cell. A decrease in sensitivity for example, can be a decrease of at least 10%, as compared to a reference control level, or a decrease of least about 20%, or at least about 30%, or at least about 40%, or at least about 50%, or at least about 60%, or at least about 70%, or at least about 80%, or at least about 90%, or at least about 100%, or at least about 200%, or at least about 300% or at least about 400%. A decrease in sensitivity of a target cell can be a decrease of at least about 20%, or at least about 30%, or at least about 40%, or at least about 50%, or at least about 60%, or at least about 70%, or at least about 80%, or at least about 90%, or at least about 100%, or at least about 200%, or at least about 300% or at least about 400% as compared to a target cell where expression and/or activity of one or more cellular factors set forth in Table 1 is not decreased. An decrease in sensitivity can result in a decrease in target cell killing of at least 10%, as compared to a reference control level, or a decrease of least about 20%, or at least about 30%, or at least about 40%, or at least about 50%, or at least about 60%, or at least about 70%, or at least about 80%, or at least about 90%, or at least about 100%, or at least about 200%, or at least about 300% or at least about 400%.

[0027] The term “increasing expression” or “overexpression” refers to increasing the expression of a gene or protein. An increase in expression, for example, can be an increase in the amount of mRNA or protein expressed in a target cell, of at least 10%, as compared to a reference control level, or an increase of least about 20%, or at least about 30%, or at least about 40%, or at least about 50%, or at least about 60%, or at least about 70%, or at least about 80%, or at least about 90%, or at least about 100%, or at least about 200%, or at least about 300% or at least about 400%. Various methods for overexpression are known to those of skill in the art, and include, but are not limited to, stably or transiently introducing a heterologous polynucleotide encoding a protein (i.e., a cellular factor set forth in Table 1) to be overexpressed into the cell or inducing overexpression of an endogenous gene encoding the protein in the cell.

[0028] The term “inhibiting expression” refers to inhibiting or reducing the expression of a gene product, e.g., RNA or protein. As used throughout, the term “cellular factor” refers to a protein that is directly or indirectly involved in γδ T cell activity, for example, in γδ T cell cytotoxicity against a target cell. To inhibit or reduce the expression of a gene, the sequence and/or structure of the gene may be modified such that the gene would not be transcribed (for DNA) or translated (for RNA), or would not be transcribed or translated to produce a functional protein, for example, a polypeptide or protein encoded by a gene set forth in Table 1. Various methods for inhibiting or reducing expression are described in detail further herein. Some methods may introduce nucleic acid substitutions, additions, and/or deletions into the wild-type gene. Some methods may also introduce single or double strand breaks into the gene. To inhibit or reduce the expression of a protein, one may inhibit or reduce the expression of the gene or polynucleotide encoding the protein. In other embodiments, one may target the protein directly to inhibit or reduce the protein's expression using, e.g., an antibody or a protease. “Inhibited” expression refers to a decrease by at least 10% as compared to a reference control level, for example a decrease by at least about 20%, or at least about 30%, or at least about 40%, or at least about 50%, or at least about 60%, or at least about 70%, or at least about 80%, or at least about 90% or up to and including a 100% decrease (i.e. absent level as compared to a reference sample).

[0029] As used herein the phrase “heterologous” refers to what is not found in nature. The term “heterologous sequence” refers to a sequence not normally found in a given cell in nature. As such, a heterologous nucleotide or protein sequence may be: (a) foreign to its host cell (i.e., is exogenous to the cell); (b) naturally found in the host cell (i.e., endogenous) but present at an unnatural quantity in the cell (i.e., greater or lesser quantity than naturally found in the host cell); or (c) be naturally found in the host cell but positioned outside of its natural locus.

[0030] “Treating” refers to any indicia of success in the treatment or amelioration or prevention of the disease, condition, or disorder, including any objective or subjective parameter such as abatement; remission; diminishing of symptoms or making the disease condition more tolerable to the patient; slowing in the rate of degeneration or decline; or making the final point of degeneration less debilitating.

[0031] A “promoter” is defined as one or more a nucleic acid control sequences that direct transcription of a nucleic acid. As used herein, a promoter includes necessary nucleic acid sequences near the start site of transcription, such as, in the case of a polymerase II type promoter, a TATA element. A promoter also optionally includes distal enhancer or repressor elements, which can be located as much as several thousand base pairs from the start site of transcription.

[0032] As used herein, the term “complementary” or “complementarity” refers to specific base pairing between nucleotides or nucleic acids. Complementary nucleotides are, generally, A and T (or A and U), and G and C. The guide RNAs described herein can comprise sequences, for example, DNA targeting sequences that are perfectly complementary or substantially complementary (e.g., having 1-4 mismatches) to a genomic sequence.

[0033] As used throughout, by subject is meant an individual. For example, the subject is a mammal, such as a primate, and, more specifically, a human. Non-human primates are subjects as well. The term subject includes domesticated animals, such as cats, dogs, etc., livestock (for example, cattle, horses, pigs, sheep, goats, etc.) and laboratory animals (for example, ferret, chinchilla, mouse, rabbit, rat, gerbil, guinea pig, etc.). Thus, veterinary uses and medical uses and formulations are contemplated herein. The term does not denote a particular age or sex. Thus, adult and newborn subjects, whether male or female, are intended to be covered. As used herein, patient or subject may be used interchangeably and can refer to a subject afflicted with a disease or disorder.

[0034] As used throughout, the term “targeted nuclease” refers to nuclease that is targeted to a specific DNA sequence in the genome of a cell to produce a strand break at that specific DNA sequence. The strand break can be single-stranded or double-stranded. Targeted nucleases include, but are not limited to, a Cas nuclease, a TAL-effector nuclease and a zinc finger nuclease.

[0035] The “CRISPR/Cas” system refers to a widespread class of bacterial systems for defense against foreign nucleic acid. CRISPR/Cas systems are found in a wide range of eubacterial and archaeal organisms. CRISPR/Cas systems include type I, II, and III sub-types. Wild-type type II CRISPR/Cas systems utilize an RNA-mediated nuclease, for example, Cas9, in complex with guide and activating RNA to recognize and cleave foreign nucleic acid. Guide RNAs having the activity of both a guide RNA and an activating RNA are also known in the art. In some cases, such dual activity guide RNAs are referred to as a single guide RNA (sgRNA).

[0036] Cas9 homologs are found in a wide variety of eubacteria, including, but not limited to bacteria of the following taxonomic groups: Actinobacteria, Aquificae, Bacteroidetes-Chlorobi, Chlamydiae-Verrucomicrobia, Chlroflexi, Cyanobacteria, Firmicutes, Proteobacteria, Spirochaetes, and Thermotogae. An exemplary Cas9 protein is the Streptococcus pyogenes Cas9 protein. Additional Cas9 proteins and homologs thereof are described in, e.g., Chylinksi, et al., RNA Biol. 2013 May 1; 10(5): 726-737; Nat. Rev. Microbiol. 2011 June; 9(6): 467-477; Hou, et al., Proc Natl Acad Sci USA. 2013 Sep 24; 110(39):15644-9; Sampson et al., Nature. 2013 May 9; 497(7448):254-7; and Jinek, et al., Science. 2012 Aug 17; 337(6096):816-21. Variants of any of the Cas9 nucleases provided herein can be optimized for efficient activity or enhanced stability in the host cell. Thus, engineered Cas9 nucleases are also contemplated.

[0037] As used throughout, a guide RNA (gRNA) sequence is a sequence that interacts with a site-specific or targeted nuclease and specifically binds to or hybridizes to a target nucleic acid within the genome of a cell, such that the gRNA and the targeted nuclease co-localize to the target nucleic acid in the genome of the cell. Each gRNA includes a DNA targeting sequence or protospacer sequence of about 10 to 50 nucleotides in length that specifically binds to or hybridizes to a target DNA sequence in the genome. For example, the targeting sequence may be about 10, 11, 12, 13, 14, 15, 16, 17, 18, 19, 20, 21, 22, 23, 24, 25, 26, 27, 28, 29, 30, 31, 32, 33, 34, 35, 36, 37, 38, 39, 40, 41, 42, 43, 44, 45, 46, 47, 48, 49, or 50 nucleotides in length. In some embodiments, the gRNA comprises a crRNA sequence and a transactivating crRNA (tracrRNA) sequence. In some embodiments, the gRNA does not comprise a tracrRNA sequence.

[0038] As used herein, the term “Cas9” refers to an RNA-mediated nuclease (e.g., of bacterial or archeal orgin, or derived therefrom). Exemplary RNA-mediated nucleases include the foregoing Cas9 proteins and homologs thereof. Other RNA-mediated nucleases include Cpf1 (See, e.g., Zetsche et al., Cell, Volume 163, Issue 3, p759-771, 22 Oct. 2015) and homologs thereof. Similarly, as used herein, the term “Cas9 ribonucleoprotein” complex and the like refers to a complex between the Cas9 protein and a guide RNA, the Cas9 protein and a crRNA, the Cas9 protein and a trans-activating crRNA (tracrRNA), or a combination thereof (e.g., a complex containing the Cas9 protein, a tracrRNA, and a crRNA guide RNA). It is understood that in any of the embodiments described herein, a Cas9 nuclease can be subsitututed with a Cpf1 nuclease or any other guided nuclease.

[0039] As used herein, the phrase “modifying” refers to inducing a structural change in the sequence of the genome at a target genomic region in a cell, for example, a target cell or a γδ T cell. For example, the modifying can take the form of inserting a nucleotide sequence into the genome of the cell. Such modifying can be performed, for example, by inducing a double stranded break within a target genomic region, or a pair of single stranded nicks on opposite strands and flanking the target genomic region. Methods for inducing single or double stranded breaks at or within a target genomic region include the use of a Cas9 nuclease domain, or a derivative thereof, and a guide RNA, or pair of guide RNAs, directed to the target genomic region. “Modifying” can also refer to altering the expression of a gene or protein in a γδ T cell, for example inhibiting expression of a gene or protein or overexpressing a protein in a γδ T cell.

[0040] As used herein, the phrase “introducing” in the context of introducing a nucleic acid or a complex comprising a nucleic acid, for example, an RNP complex, refers to the translocation of the nucleic acid sequence or the RNP complex from outside a cell to inside the cell. In some cases, introducing refers to translocation of the nucleic acid or the complex from outside the cell to inside the nucleus of the cell. Various methods of such translocation are contemplated, including but not limited to, electroporation, contact with nanowires or nanotubes, receptor mediated internalization, translocation via cell penetrating peptides, liposome mediated translocation, and the like.

### DETAILED DESCRIPTION OF THE INVENTION

[0041] The following description recites various aspects and embodiments of the present compositions and methods. No particular embodiment is intended to define the scope of the compositions and methods. Rather, the embodiments merely provide non-limiting examples of various compositions and methods that are at least included within the scope of the disclosed compositions and methods. The description is to be read from the perspective of one of ordinary skill in the art; therefore, information well known to the skilled artisan is not necessarily included.

### I. Introduction

[0042] γδ T cells are a specialized subset of T cells in peripheral blood that are part of both the adaptive and innate immune system. Due to their donor-unrestricted nature (i.e., they are not MHC-restricted) and their ability to kill a wide variety of tumor cells, these cells are strong cell therapy candidates. However, little is known about the factors that γδ T cells recognize on target cells. The inventors have identified cellular factors that are involved in γδ T cell cytotoxicity against target cells.

### II. Methods and Compositions

[0043] As described herein, the disclosure provides compositions and methods directed to altering sensitivity of a target cell to killing by a γδ T cell. The disclosure provides methods of increasing sensitivity of target cells to killing by γδ T cells by increasing the expression and/or activity of one or more cellular factors on the target cell. Compositions and methods directed to decreasing sensitivity of a target cell to killing by γδ T cells, by decreasing the expression and/or activity of one or more cellular factors on the target cell are also provided. The disclosure also features compositions comprising modified γδ T cells and populations of modified γδ T cells that express a cell-surface ligand, that binds to a cellular factor set forth herein.

[0044] Examples of cellular factors whose expression and/or activity may be altered to increase or decrease sensitivity of a target cell to killing by a γδ T cell in the methods described herein include, but are not limited to, the cellular factors set forth in Table 1. National Center for Biotechnology Information (NCBI) Gene (formerly Entrez Gene) ID for each of the cellular factors and their splice variants, if applicable, are provided in Table 2. Amino acid sequences encoding the cellular factors, and their splice variants, if applicable, are are also provided in Table 2. All of the nucleotide and protein sequences set forth under each NCBI Gene ID are hereby incorporated in their entireties by this reference. The protein sequence of any of the cellular factors set forth herein can comprise, consist of or consist essentially of any of the amino acid sequences listed in Table 2. Any of the amino acid sequences listed in Table 2 having an X as a first amino acid also include the amino acid sequence that does not have an X as the first amino acid. In some embodiments, sensitivity of a a population of target cells to killing by a γδ T cell is increased or decreased. In some embodiments, the present invention provides a method of increasing sensitivity of a target cell to killing by a γδ T cell, comprising: increasing expression and/or activity of one or more cellular factors set forth in Table 1, in some embodiments, the present invention provides a method of decreasing sensitivity of a target cell to killing by a γδ T cell, comprising: decreasing expression and/or activity of one or more cellular factors set forth in Table 1, In some embodiments, the sensitivity of the cell is increased or decreased in the presence of the γδ T cell or a population of γδ T cells. Methods for measuring an increase or a decrease in the sensitivity of a target cell to killing by γδ T cells are available to those of skill in the art. See, for example Vollenweider et al. (1993). Heterogeneous binding and killing behaviour of human gamma/delta-TCR+ lymphokine-activated killer cells against K562 and Daudi cells. Cancer Immunology, Immunotherapy: CII, 36(5), 331-336; Burjanadzé et al. (2007). In vitro expansion of gamma delta T cells with anti-myeloma cell activity by Phosphostim and IL-2 in patients with multiple myeloma. British Journal of Haematology, 139(2), 206-216; and D'Asaroet al. (2010). V gamma 9V delta 2 T lymphocytes efficiently recognize and kill zoledronate-sensitized, imatinib-sensitive, and imatinib-resistant chronic myelogenous leukemia cells. The Journal of Immunology, 184(6), 3260-3268.

[0045] In some embodiments, expression of an amino acid sequence having at least about 80%, 85%, 90%, 95% or 99% identity to an amino acid sequence set forth in Table 1 is increased or decreased. It is understood that, when referring to one or more cellular factors set forth in Table 1, this can be the protein, i.e., the cellular factor, or the polynucleotide encoding the cellular factor.

[0046] In the methods provided herein, γδ T cell activity, for example target cell killing, can be increased (for example, when sensitivity to cell killing is increased in a target cell) or decreased (for example, when sensitivity to cell killing is decreased in a target cell). To increase the activity of γδ T cells refers to any treatment or manipulation of target cells or γδ T cells which results in an increase (i.e., enhancement, upregulation, induction, stimulation) in the number, activation, biological activity and/or survivability of the γδ T cells. Therefore, increasing the activity of γδ T cells can be accomplished by increasing the number of γδ T cells in a subject (i.e., by causing the cells to proliferate/expand or by recruiting additional γδ T cells to a site), by increasing the activation of γδ T cells in a subject, by decreasing the proximity of γδ T cells to a target cell, by increasing biological activity of γδ T cells (e.g., effector functions or other activities of the cell) in an animal and/or by increasing the ability of γδ T cells to survive in a subject. To decrease the activity of γδ T cells refers to any treatment or manipulation of target cells or γδ T cells which results in a decrease (i.e., reduction, downregulation, inhibition) in the number, activation, biological activity and/or survivability of the γδ T cells. Therefore, decreasing the activity of γδ T cells can be accomplished by decreasing the number of γδ T cells in a subject, by decreasing the activation of γδ T cells in a subject, by decreasing biological activity of γδ T cells (e.g., effector functions or other activities of the cell) in a subject and/or by decreasing the ability of γδ T cells to survive in a subject.

TABLE 1

| | | Falde- | | Log2 | |
|---|---|---|---|---|---|
| | | discover | | Fold | |
| Gene ID | p-value | Rate | Rank | Change | Localization |
| BTN3A1 | 2.75E−07 | 0.00033 | 1 | 2.0651 | Surface |
| SPIB | 2.75E−07 | 0.00033 | 2 | 1.2994 | Intracellular |
| IRF1 | 2.75E−07 | 0.00033 | 3 | 1.6107 | Intracellular |
| FBXW7 | 2.75E−07 | 0.00033 | 4 | 1.1113 | Intracellular |
| BTN2A1 | 2.75E−07 | 0.00033 | 5 | 1.7442 | Surface |
| RFXAP | 2.75E−07 | 0.00033 | 6 | 1.5428 | Intracellular |
| ACAT2 | 2.75E−07 | 0.00033 | 7 | 1.9893 | Intracellular |
| NLRC5 | 2.75E−07 | 0.00033 | 8 | 0.86688 | Intracellular |
| SQLE | 2.75E−07 | 0.00033 | 9 | 0.83862 | Intracellular |
| BTN3A2 | 2.75E−07 | 0.00033 | 10 | 1.5982 | Surface |
| SPI1 | 2.75E−07 | 0.00033 | 11 | 1.2165 | Intracellular |
| IRF9 | 2.75E−07 | 0.00033 | 12 | 0.96081 | Intracellular |
| GGNBP2 | 2.75E−07 | 0.00033 | 13 | 1.0078 | Intracellular |
| IRF8 | 2.75E−07 | 0.00033 | 14 | 1.0578 | Intracellular |
| SIRT1 | 2.75E−07 | 0.00033 | 15 | 1.0665 | Intracellular |
| GLTSCR1 | 8.25E−07 | 0.000782 | 16 | 0.7409 | Intracellular |
| MYLIP | 8.25E−07 | 0.000782 | 17 | 0.86979 | Intracellular |
| CREBBP | 8.25E−07 | 0.000782 | 18 | 0.8983 | Intracellular |
| MGA | 8.25E−07 | 0.000782 | 19 | 0.82215 | Intracellular |
| ZHX2 | 1.37E−06 | 0.001179 | 20 | 0.71898 | Intracellular |
| ZBTB7A | 1.37E−06 | 0.001179 | 21 | 0.54501 | Intracellular |
| RCE1 | 3.02E−06 | 0.002475 | 22 | 0.67358 | Intracellular |
| SLC25A19 | 4.12E−06 | 0.003229 | 23 | 0.73648 | Intracellular |
| CSNK2A1 | 6.32E−06 | 0.004744 | 24 | 1.1232 | Intracellular |
| NPRL2 | 1.07E−05 | 0.007723 | 25 | 0.80111 | Intracellular |
| LRRC8A | 1.40E−05 | 0.009711 | 26 | 0.61842 | Surface |
| TSPYL2 | 1.51E−05 | 0.010084 | 27 | 0.6468 | Intracellular |
| STAT2 | 1.84E−05 | 0.011846 | 28 | 0.97544 | Intracellular |
| JAK1 | 2.28E−05 | 0.014169 | 29 | 0.81642 | Intracellular |
| GLA | 2.45E−05 | 0.014686 | 30 | 0.64116 | Intracellular |
| FTSJ1 | 2.78E−05 | 0.016129 | 31 | 0.51345 | Intracellular |
| THY1 | 4.32E−05 | 0.024288 | 32 | 0.58375 | Surface |
| HDAC4 | 4.87E−05 | 0.026553 | 33 | 0.55804 | Intracellular |
| FOXP1 | 8.77E−05 | 0.038517 | 34 | 0.57003 | Intracellular |
| PDS5B | 5.17E−05 | 0.027373 | 35 | 0.79912 | Intracellular |
| AFF3 | 5.91E−05 | 0.03041 | 36 | 0.69448 | Intracellular |
| S1PR2 | 6.24E−05 | 0.031216 | 37 | 0.76215 | Surface |
| HPS3 | 6.74E−05 | 0.03278 | 38 | 0.57092 | Intracellular |
| STAT1 | 7.78E−05 | 0.036868 | 39 | 0.68125 | Intracellular |
| XK | 8.61E−05 | 0.038517 | 40 | 0.51888 | Surface |
| HMGCR | 8.77E−05 | 0.038517 | 41 | 0.67715 | Intracellular |
| MTA2 | 9.27E−05 | 0.039722 | 42 | 0.76151 | Intracellular |
| MPC2 | 9.71E−05 | 0.04064 | 43 | 0.75121 | Intracellular |
| XPNPEP1 | 0.00010915 | 0.044667 | 44 | 0.74729 | Intracellular |
| GFI1 | 0.00012675 | 0.050474 | 45 | 0.48516 | Intracellular |
| PRKD3 | 0.00012894 | 0.050474 | 46 | 0.62809 | Intracellular |
| ADAM22 | 0.00014764 | 0.056562 | 47 | 0.6288 | Surface |
| ICAM1 | 0.00016249 | 0.060953 | 48 | 1.1527 | Surface |
| LRRC8C | 0.00016964 | 0.062336 | 49 | 0.68614 | Surface |
| PRKCE | 0.00017458 | 0.062871 | 50 | 0.55031 | Intracellular |
| ACSL3 | 0.00019053 | 0.065975 | 51 | 0.60161 | Intracellular |
| KCNG2 | 0.00021857 | 0.074257 | 52 | 0.48822 | Unknown |
| SULT1A2 | 0.00018338 | 0.064745 | 53 | 0.41917 | Intracellular |
| MTMR8 | 0.00022627 | 0.075449 | 54 | 0.67626 | Intracellular |
| CPSF7 | 0.00023782 | 0.076221 | 55 | 0.52652 | Intracellular |
| SGMS1 | 0.00023837 | 0.076221 | 56 | 0.81844 | Intracellular |
| EFHC2 | 0.00024387 | 0.076221 | 57 | 0.65609 | Intracellular |
| MOSPD1 | 0.00024552 | 0.076221 | 58 | 0.64724 | Intracellular |
| ZNF699 | 0.00026036 | 0.07896 | 59 | 1.0114 | Intracellular |
| ZC3H12A | 0.00026311 | 0.07896 | 60 | 0.59232 | Intracellular |
| IFNAR1 | 0.00027686 | 0.080033 | 61 | 1.2274 | Surface |
| LRBA | 0.00028126 | 0.080033 | 62 | 0.67749 | Intracellular |
| DDIT4 | 0.00028676 | 0.080033 | 63 | 0.60138 | Intracellular |
| CDK5 | 0.00029226 | 0.080033 | 64 | 0.32866 | Intracellular |
| ZNF687 | 0.00029281 | 0.080033 | 65 | 0.66561 | Intracellular |
| SLC37A3 | 0.00029336 | 0.080033 | 66 | 0.72918 | Intracellular |
| PNKD | 0.00048086 | 0.11637 | 67 | 0.46774 | Intracellular |
| G2E3 | 0.00030435 | 0.081794 | 68 | 0.85742 | Intracellular |
| FAM122A | 0.00032855 | 0.086998 | 69 | 0.49139 | Intracellular |
| AMMECR1 | 0.00036154 | 0.094346 | 70 | 0.53388 | Intracellular |
| CARKD | 0.00038683 | 0.098661 | 71 | 0.44109 | Intracellular |
| GSPT2 | 0.00038903 | 0.098661 | 72 | 0.57598 | Intracellular |

TABLE 2

| | | NCBI gene ID | | | |
|---|---|---|---|---|---|
| Gene/protein | | (formerly Entrez | | | |
| ID | Gene description | (gene) | Length | Amino acid sequence | SEQ ID NO: |
| GGNBP2 | gametogenetin binding | 79893 | 698 | MARLVAVCRDGEEEFPFERRQIPLYIDDTLTMVMEFPDNVLNLDGH | 1. |
| | protein 2 | | | QNNGAQLKQFIQRHGMLKQQDLSIAMVVTSREVLSALSQLVPCVG | |
| | [Source:HGNC | | | CRRSVERLFSQLVESGNPALEPLTVGPKGVLSVTRSCMTDAKKLYT | |
| | Symbol; Acc:HGNC: | | | LFYVHGSKLNDMIDAIPKSKKNKRCQLHSLDTHKPKPLGGCWMDV | |
| | 19357] | | | WELMSQECRDEVVLIDSSCLLETLETYLRKHRFCTDCKNKVLRAY | |
| | | | | NILIGELDCSKEKGYCAALYEGLRCCPHERHIHVCCETDFIAHLLGR | |
| | | | | AEPEFAGGRRERHAKTIDIAQEEVLTCLGIHLYERLHRIWQKLRAEE | |
| | | | | QTWQMLFYLGVDALRKSFEMTVEKVQGISRLEQLCEEFSEEERVRE | |
| | | | | LKQEKKRQKRKNRRKNKCVCDIPTPLQTADEKEVSQEKETDFIENS | |
| | | | | SCKACGSTEDGNTCVEVIVTNENTSCTCPSSGNLLGSPKIKKGLSPH | |
| | | | | CNGSDCGYSSSMEGSETGSREGSDVACTEGICNHDEHGDDSCVHH | |
| | | | | CEDKEDDGDSCVECWANSEENDTKGKNKKKKKKSKILKCDEHIQK | |
| | | | | LGSCITDPGNRETSGNTMHTVFHRDKTKDTHPESCCSSEKGGQPLP | |
| | | | | WFEHRKNVPQFAEPTETLFGPDSGKGAKSLVELLDESECTSDEEIFIS | |
| | | | | QDEIQSFMANNQSFYSNREQYRQHLKEKFNKYCRLNDHKRPICSG | |
| | | | | WLTTAGAN* | |
| GGNBP2 | gametogenetin binding | 79893 | 134 | XDTKGKNKKKKKKSKILKCDEHIQKLGSCITDPGNRETSGNTMHTV | 2. |
| | protein 2 | | | FHRDKTKDTHPESCCSSEKGGQPLPWFEHRKNVPQFAEPTETLFGP | |
| | [Source:HGNC | | | DSGKGAKSLVELLVSIPCGLTVHNCLGTGWMWEGIVFEGLR* | |
| | Symbol; Acc:HGNC: | | | | |
| | 19357] | | | | |
| GGNBP2 | gametogenetin binding | 79893 | 158 | MARLVAVCRDGEEEFPFERRQIPLYIDDTLTMVMEFPDNVLNLDGH | 3. |
| | protein 2 | | | QNNGAQLKQFIQRHGMLKQQDLSIAMVVTSREVLSALSQLVPCVG | |
| | [Source:HGNC | | | CRRSVERLFSQLVESGNPALEPLTVGPKGVLSVTRSCMTDAKKLYT | |
| | Symbol; Acc:HGNC: | | | LFYVHGSKLNDMIDAIPKSKK | |
| | 19357] | | | | |
| GGNBP2 | gametogenetin binding | 79893 | 69 | MARLVAVCRDGEEEFPFERRQIPLYIDDTLTVSGPGRAGPAAPLAA | 4. |
| | protein 2 | | | VSPPPPPPGRALRTGERVCCNS* | |
| | [Source:HGNC | | | | |
| | Symbol; Acc:HGNC: | | | | |
| | 19357] | | | | |
| PDS5B | PDS5 cohesin | 23047 | 1448 | MAHSKTRTNDGKITYPPGVKEISDKISKEEMVRRLKMVVKTFMDM | 5. |
| | associated factor B | | | DQDSEEEKELYLNLALHLASDFFLKHPDKDVRLLVACCLADIFRIY | |
| | [Source:HGNC | | | APEAPYTSPDKLKDIFMFITRQLKGLEDTKSPQFNRYFYLLENIAWV | |
| | Symbol; Acc:HGNC: | | | KSYNICFELEDSNEIFTQLYRTLFSVINNGHNQKVHMHMVDLMSSII | |
| | 20418] | | | CEGDTVSQELLDTVLVNLVPAHKNLNKQAYDLAKALLKRTAQAIE | |
| | | | | PYITNFFNQVLMLGKTSISDLSEHVFDLILELYNIDSHLLLSVLPQLEF | |
| | | | | KLKSNDNEERLQVVKLLAKMFGAKDSELASQNKPLWQCYLGRFN | |
| | | | | DIHVPIRLECVKFASHCLMNHPDLAKDLTEYLKVRSHDPEEAIRHD | |
| | | | | VIVSIVTAAKKDILLVNDHLLNFVRERTLDKRWRVRKEAMMGLAQ | |
| | | | | IYKKYALQSAAGKDAAKQIAWIKDKLLHIYYQNSIDDRLLVERIFA | |
| | | | | QYMVPHNLETTERMKCLYYLYATLDLNAVKALNEMWKCQNLLR | |
| | | | | HQVKDLLDLIKQPKTDASVKAIFSKVMVITRNLPDPGKAQDFMKKF | |
| | | | | TQVLEDDEKIRKQLEVLVSPTCSCKQAEGCVREITKKLGNPKQPTN | |
| | | | | PFLEMIKFLLERIAPVHIDTESISALIKQVNKSIDGTADDEDEGVPTD | |
| | | | | QAIRAGLELLKVLSFTHPISFHSAETFESLLACLKMDDEKVAEAALQ | |
| | | | | IFKNTGSKIEEDFPHIRSALLPVLHHKSKKGPPRQAKYAIHCIHAIFSS | |
| | | | | KETQFAQIFEPLHKSLDPSNLEHLITPLVTIGHIALLAPDQFAAPLKSL | |
| | | | | VATFIVKDLLMNDRLPGKKTTKLWVPDEEVSPETMVKIQAIKMMV | |
| | | | | RWLLGMKNNHSKSGTSTLRLLTTILHSDGDLTEQGKISKPDMSRLR | |
| | | | | LAAGSAIVKLAQEPCYHEIITLEQYQLCALAINDECYQVRQVFAQK | |
| | | | | LHKGLSRLRLPLEYMAICALCAKDPVKERRAHARQCLVKNINVRR | |
| | | | | EYLKQHAAVSEKLLSLLPEYVVPYTIHLLAHDPDYVKVQDIEQLKD | |
| | | | | VKECLWFVLEILMAKNENNSHAFIRKMVENIKQTKDAQGPDDAKM | |
| | | | | NEKLYTVCDVAMNIIMSKSTTYSLESPKDPVLPARFFTQPDKNFSNT | |
| | | | | KNYLPPEMKSFFTPGKPKTTNVLGAVNKPLSSAGKQSQTKSSRMET | |
| | | | | VSNASSSSNPSSPGRIKGRLDSSEMDHSENEDYTMSSPLPGKKSDKR | |
| | | | | DDSDLVRSELEKPRGRKKTPVTEQEEKLGMDDLTKLVQEQKPKGS | |
| | | | | QRSRKRGHTASESDEQQWPEEKRLKEDILENEDEQNSPPKKGKRGR | |
| | | | | PPKPLGGGTPKEEPTMKTSKKGSKKKSGPPAPEEEEEEERQSGNTEQ | |
| | | | | KSKSKQHRVSRRAQQRAESPESSAIESTQSTPQKGRGRPSKTPSPSQ | |
| | | | | PKKNVRVGRSKQAATKENDSSEEVDVFQGSSPVDDIPQEETEEEEV | |
| | | | | STVNVRRRSAKRERR* | |
| PDS5B | PDS5 cohesin | 23047 | 1392 | MAHSKTRTNDGKITYPPGVKEISDKISKEEMVRRLKMVVKTFMDM | 6. |
| | associated factor B | | | DQDSEEEKELYLNLALHLASDFFLKHPDKDVRLLVACCLADIFRIY | |
| | [Source:HGNC | | | APEAPYTSPDKLKDIFMFITRQLKGLEDTKSPQFNRYFYLLENIAWV | |
| | Symbol; Acc:HGNC: | | | KSYNICFELEDSNEIFTQLYRTLFSVINNGHNQKVHMHMVDLMSSII | |
| | 20418] | | | CEGDTVSQELLDTVLVNLVPAHKNLNKQAYDLAKALLKRTAQAIE | |
| | | | | PYITNFFNQVLMLGKTSISDLSEHVFDLILELYNIDSHLLLSVLPQLEF | |
| | | | | KLKSNDNEERLQVVKLLAKMFGAKDSELASQNKPLWQCYLGRFN | |
| | | | | DIHVPIRLECVKFASHCLMNHPDLAKDLTEYLKVRSHDPEEAIRHD | |
| | | | | VIVSIVTAAKKDILLVNDHLLNFVRERTLDKRWRVRKEAMMGLAQ | |
| | | | | IYKKYALQSAAGKDAAKQIAWIKDKLLHIYYQNSIDDRLLVERIFA | |
| | | | | QYMVPHNLETTERMKCLYYLYATLDLNAVKALNEMWKCQNLLR | |
| | | | | HQVKDLLDLIKQPKTDASVKAIFSKVMVITRNLPDPGKAQDFMKKF | |
| | | | | TQVLEDDEKIRKQLEVLVSPTCSCKQAEGCVREITKKLGNPKQPTN | |
| | | | | PFLEMIKFLLERIAPVHIDTESISALIKQVNKSIDGTADDEDEGVPTD | |
| | | | | QAIRAGLELLKVLSFTHPISFHSAETFESLLACLKMDDEKVAEAALQ | |
| | | | | IFKNTGSKIEEDFPHIRSALLPVLHHKSKKGPPRQAKYAIHCIHAIFSS | |
| | | | | KETQFAQIFEPLHKSLDPSNLEHLITPLVTIGHIALLAPDQFAAPLKSL | |
| | | | | VATFIVKDLLMNDRLPGKKTTKLWVPDEEVSPETMVKIQAIKMMV | |
| | | | | RWLLGMKNNHSKSGTSTLRLLTTILHSDGDLTEQGKISKPDMSRLR | |
| | | | | LAAGSAIVKLAQEPCYHEIITLEQYQLCALAINDECYQVRQVFAQK | |
| | | | | LHKGLSRLRLPLEYMAICALCAKDPVKERRAHARQCLVKNINVRR | |
| | | | | EYLKQHAAVSEKLLSLLPEYVVPYTIHLLAHDPDYVKVQDIEQLKD | |
| | | | | VKECLWFVLEILMAKNENNSHAFIRKMVENIKQTKDAQGPDDAKM | |
| | | | | NEKLYTVCDVAMNIIMSKSTTYSLESPKDPVLPARFFTQPDKNFSNT | |
| | | | | KNYLPPEMKSFFTPGKPKTTNVLGAVNKPLSSAGKQSQTKSSRMET | |
| | | | | VSNASSSSNPSSPGRIKGRLDSSEMDHSENEDYTMSSPLPGKKSDKR | |
| | | | | DDSDLVRSELEKPRGRKKTPVTEQEEKLGMDDLTKLVQEQKPKGS | |
| | | | | QRSRKRGHTASESDEQQWPEEKRLKEDILENEDEQNSPPKKGKRGR | |
| | | | | PPKPLGGGTPKEEPTMKTSKKGSKKKSGPPAPEEEEEEERQSGNTEQ | |
| | | | | KSKSKQHRVSRRAQQRAESPESSAIESTQSTPQKGRGRPSKTPSPSQ | |
| | | | | PKKNV* | |
| PDS5B | PDS5 cohesin | 23047 | 302 | IKQTKDAQGPDDAKMNEKLYTVCDVAMNIIMSKSTTYSLESPKDP | 7. |
| | associated factor B | | | VLPARFFTQPDKNFSNTKNYLPPEMKSFFTPGKPKTTNVLGAVNKP | |
| | [Source:HGNC | | | LSSAGKQSQTKSSRMETVSNASSSSNPSSPGRIKGRLDSSEMDHSEN | |
| | Symbol; Acc:HGNC: | | | EDYTMSSPLPGKKSDKRDDSDLSELEKPRGRKKTPVTEQEEKLGM | |
| | 20418] | | | DDLTKLVQEQKPKGSQRSRKRGHTASESDEQQWPEEKRLKEDILEN | |
| | | | | EDEQNSPPKKGKRGRPPKPLGGGTPKEEPTMKTSKKGSKKKSGPPA | |
| | | | | PEEEEEEERQSGNTEQKSKSKQHRVSR | |
| IRF9 | interferon regulatory | 10379 | 210 | EGDTGGPAVWKTRLRCALNKSSEFKEVPERGRMDVAEPYKVYQLL | 8. |
| | factor 9 [Source:HGNC | | | PPGIVSGQPGTQKVPSKRQHSSVSSERKEEEDAMQNCTLSPSVLQDS | |
| | Symbol; Acc:HGNC: | | | LNNEEEGASGGAVHSDIGSSSSSSSPEPQEVTDTTEAPFQGDQRSLEF | |
| | 6131] | | | LLPPEPDLVRYFQGLGPPPKFQVTLNFWEESHGSSHTPQNLITVKME | |
| | | | | QAFARYLLEQTPEQQAAILSLV* | |
| IRF9 | interferon regulatory | 10379 | 394 | MASGRARCTRKLRNWVVEQVESGQFPGVCWDDTAKTMFRIPWKH | 9. |
| | factor 9 [Source:HGNC | | | AGKQDFREDQDAAFFKAWAIFKGKYKEGDTGGPAVWKTRLRCAL | |
| | Symbol; Acc:HGNC: | | | NKSSEFKEVPERGRMDVAEPYKVYQLLPPGIVSGQPGTQKVPSKRQ | |
| | 6131] | | | HSSVSSERKEEEDAMQNCTLSPSVLQDSLNNEEEGASGGAVHSDIG | |
| | | | | SSSSSSSPEPQEVTDTTEAPFQGDQRSLEFLLPPEPDYSLLLTFIYNGR | |
| | | | | VVGEAQVQSLDCRLVAEPSGSESSMEQVLFPKPGPLEPTQRLLSQLE | |
| | | | | RGILVASNPRGLFVQRLCPIPISWNAPQAPPGPGPHLLPSNECVELFR | |
| | | | | TAYFCRDLVRYFQGLGPPPKFQVTLNFWEESHGSSHTPQNLITVKM | |
| | | | | EQAFARYLLEQTPEQQAAILSLV* | |
| IRF9 | interferon regulatory | 10379 | 51 | MASGRARCTRKLRNWVVEQVESGQFPGVCWDDTAKTMFRIPWKH | 10. |
| | factor 9 [Source:HGNC | | | AGLGNI* | |
| | Symbol; Acc:HGNC: | | | | |
| | 6131] | | | | |
| IRF9 | interferon regulatory | 10379 | 354 | MDVAEPYKVYQLLPPGIVSGQPGTQKVPSKRQHSSVSSERKEEEDA | 11. |
| | factor 9 [Source:HGNC | | | MQNCTLSPSVLQDSLNNEEEGASGGAVHSDIGSSSSSSSPEPQEVTD | |
| | Symbol; Acc:HGNC: | | | TTEAPFQGDQRSLEFLLPPEPDYSLLLTFIYNGRVVGEAQVQSLDCR | |
| | 6131] | | | LVAEPSGSESSMEQVLFPKPGPLEPTQRLLSQLERGILVASNPRGLFV | |
| | | | | QRLCPIPISWNAPQAPPGPGPHLLPSNECVELFRTAYFCRDPPCSLC | |
| | | | | MALLRLCVAYPVWPYAQPGSYLAALLQPRQWKRWFRLGQVLSGP | |
| | | | | GPPTEVPGNTEFLGREPWLQPYSTESYHSEDGAGLCPILAGADSRA | |
| | | | | AGSHSVPGVEPGGPIFHLTSLFFLSPLK* | |
| IRF9 | interferon regulatory | 10379 | 267 | MASGRARCTRKLRNWVVEQVESGQFPGVCWDDTAKTMFRIPWKH | 12. |
| | factor 9 [Source:HGNC | | | AGKQDFREDQDAAFFKAWAIFKGKYKEGDTGGPAVWKTRLRCAL | |
| | Symbol; Acc:HGNC: | | | NKSSEFKEVPERGRMDVAEPYKVYQLLPPGIVSGQPGTQKVPSKRQ | |
| | 6131] | | | HSSVSSERKEEEDAMQNCTLSPSVLQDSLNNEEEGASGGAVHSDIG | |
| | | | | SSSSSSSPEPQEVTDTTEAPFQGDQRSLEFLLPPEPAPGRAVLSPDYS | |
| | | | | LLLTFIYNGRVVGEAQVQSLDCRLVAEPSGSESSMEQVL | |
| IRF9 | interferon regulatory | 10379 | 179 | MASGRARCTRKLRNWVVEQVESGQFPGVCWDDTAKTMFRIPWKH | 13. |
| | factor 9 [Source:HGNC | | | AGKQDFREDQDAAFFKAWAIFKGKYKEGDTGGPAVWKTRLRCAL | |
| | Symbol; Acc:HGNC: | | | NKSSEFKEVPERGRMDVAEPYKVYQLLPPGIVSGQPGTQKVPSKRQ | |
| | 6131] | | | HSSVSSERKEEEDAMQNCTLSPSVLQDSLNNLQTQLRPPFKGIRG | |
| RFXAP | regulatory factor X | 5994 | 273 | MEAQGVAEGAGPGAASGVPHPAALAPAAAPTLAPASVAAAASQFT | 14. |
| | associated protein | | | LLVMQPCAGQDEAAAPGGSVGAGKPVRYLCEGAGDGEEEAGEDE | |
| | [Source:HGNC | | | ADLLDTSDPPGGGESAASLEDLEDEETHSGGEGSSGGARRRGSGGG | |
| | Symbol; Acc:HGNC: | | | SMSKTCTYEGCSETTSQVAKQRKPWMCKKHRNKMYKDKYKKKK | |
| | 9988] | | | SDQALNCGGTASTGSAGNVKLEESADNILSIVKQRTGSFGDRPARP | |
| | | | | TLLEQVLNQKRLSLLRSPEVVQFLQKQQQLLNQQVLEQRQQQFPGT | |
| | | | | SM* | |
| IFNAR1 | interferon alpha and | 3454 | 558 | MMVVLLGATTLVLVAVAPWVLSAAAGGKNLKSPQKVEVDIIDDN | 15. |
| | beta receptor subunit 1 | | | FILRWNRSDESVGNVTFSFDYQKTGMDNWIKLSGCQNITSTKCNFS | |
| | [Source:HGNC | | | SLKLNVYEEIKLRIRAEKENTSSWYEVDSFTPFRKAQIGPPEVHLEA | |
| | Symbol; Acc:HGNC: | | | EDKAIVIHISPGTKDSVMWALDGLSFTYSLVIWKNSSGVEERIENIYS | |
| | 5432] | | | RHKIYKLSPETTYCLKVKAALLTSWKIGVYSPVHCIKTTVENELPPP | |
| | | | | ENIEVSVQNQNYVLKWDYTYANMTFQVQWLHAFLKRNPGNHLYK | |
| | | | | WKQIPDCENVKTTQCVFPQNVFQKGIYLLRVQASDGNNTSFWSEEI | |
| | | | | KFDTEIQAFLLPPVFNIRSLSDSFHIYIGAPKQSGNTPVIQDYPLIYEII | |
| | | | | FWENTSNAERKIIEKKTDVTVPNLKPLTVYCVKARAHTMDEKLNK | |
| | | | | SSVFSDAVCEKTKPGNTSKIWLIVGICIALFALPFVIYAAKVFLRCIN | |
| | | | | YVFFPSLKPSSSIDEYFSEQPLKNLLLSTSEEQIEKCFIIENISTIATVEE | |
| | | | | TNQTDEDHKKYSSQTSQDSGNYSNEDESESKTSEELQQDFV* | |
| IFNAR1 | interferon alpha and | 3454 | 189 | MMVVLLGATTLVLVAVAPWVLSAAAGGKNLKSPQKVEVDIIDDN | 16. |
| | beta receptor subunit 1 | | | FILRWNRSDESVGNVTFSFDYQKTGMDNWIKLSGCQNITSTKCNFS | |
| | [Source:HGNC | | | SLKLNVYEEIKLRIRAEKENTSSWYEVDSFTPFRKVENELPPPENIEV | |
| | Symbol; Acc:HGNC: | | | SVQNQNYVLKWDYTYANMTFQVQWLHAFLKRNPGNHLYKWKQI | |
| | 5432] | | | PDCENVKT | |
| IFNAR1 | interferon alpha and | 3454 | 68 | MMVVLLGATTLVLVAVAPWVLSAAAGGKNLKSPQKVEVDIIDDN | 17. |
| | beta receptor subunit 1 | | | FILRWNRSDESVGNVTFSFDYQN* | |
| | [Source:HGNC | | | | |
| | Symbol; Acc:HGNC: | | | | |
| | 5432] | | | | |
| IFNAR1 | interferon alpha and | 3454 | 237 | MMVVLLGATTLVLVAVAPWVLSAAAGGKNLKSPQKVEVDIIDDN | 18. |
| | beta receptor subunit 1 | | | FILRWNRSDESVGNVTFSFDYQKTGMDNWIKLSGCQNITSTKCNFS | |
| | [Source:HGNC | | | SLKLNVYEEIKLRIRAEKENTSSWYEVDSFTPFRKAQIGPPEVHLEA | |
| | Symbol; Acc:HGNC: | | | EDKAIVIHISPGTKDSVMWALDGLSFTYSLVIWKNSSGVEERIENIYS | |
| | 5432] | | | RHKIYKLSPETTYCLKVKAALLTSWKIGVYSPVHCIKTTVCILGGRG | |
| | | | | RWIT* | |
| IFNAR1 | interferon alpha and | 3454 | 129 | MMVVLLGATTLVLVAVAPWVLSAAAGGKNLKSPQKVEVDIIDDN | 19. |
| | beta receptor subunit 1 | | | FILRWNRSDESVGNVTFSFDYQKTGMDNWIKLSGCQNITSTKCNFS | |
| | [Source:HGNC | | | SLKLNVYEEIKLRIRAEKENTSSWYEVDSFTPFRKGKD* | |
| | Symbol; Acc:HGNC: | | | | |
| | 5432] | | | | |
| IFNAR1 | interferon alpha and | 3454 | 271 | MMVVLLGATTLVLVAVAPWVLSAAAGGKNLKSPQKVEVDIIDDN | 20. |
| | beta receptor subunit 1 | | | FILRWNRSDESVGNVTFSFDYQKTGMDNWIKLSGCQNITSTKCNFS | |
| | [Source:HGNC | | | SLKLNVYEEIKLRIRAEKENTSSWYEVDSFTPFRKAQIGPPEVHLEA | |
| | Symbol; Acc:HGNC: | | | EDKAIVIHISPGTKDSVMWALDGLSFTYSLVIWKNSSGVEERIENIYS | |
| | 3542] | | | RHKIYKLSPETTYCLKVKAALLTSWKIGVYSPVHCIKTTVENELPPP | |
| | | | | ENIEVSVQNQNYVLKWDYTYANMTFQVQWLHLYFRRPR* | |
| IFNAR1 | interferon alpha and | 3454 | 489 | MDNWIKLSGCQNITSTKCNFSSLKLNVYEEIKLRIRAEKENTSSWYE | 21. |
| | beta receptor subunit 1 | | | VDSFTPFRKAQIGPPEVHLEAEDKAIVIHISPGTKDSVMWALDGLSF | |
| | [Source:HGNC | | | TYSLVIWKNSSGVEERIENIYSRHKIYKLSPETTYCLKVKAALLTSW | |
| | Symbol; Acc:HGNC: | | | KIGVYSPVHCIKTTVENELPPPENIEVSVQNQNYVLKWDYTYANMT | |
| | 5432] | | | FQVQWLHAFLKRNPGNHLYKWKQIPDCENVKTTQCVFPQNVFQK | |
| | | | | GIYLLRVQASDGNNTSFWSEEIKFDTEIQAFLLPPVFNIRSLSDSFHIY | |
| | | | | IGAPKQSGNTPVIQDYPLIYEIIFWENTSNAERKIIEKKTDVTVPNLKP | |
| | | | | LTVYCVKARAHTMDEKLNKSSVFSDAVCEKTKPGNTSKIWLIVGIC | |
| | | | | IALFALPFVIYAAKVFLRCINYVFFPSLKPSSSIDEYFSEQPLKNLLLS | |
| | | | | TSEEQIEKCFIIENISTIATVEETNQTDEDHKKYSSQTSQDSGNYSNE | |
| | | | | DESESKTSEELQQDFV* | |
| NAXD | NAD(P)HX | 55739 | 391 | MVTRAGAGTAVAGAVVVALLSAALALYGPPLDAVLERAFSLRKA | 22. |
| | dehydratase | | | HSIKDMENTLQLVRNIIPPLSSTKHKGQDGRIGVVGGCQEYTGAPYF | |
| | [Source:HGNC | | | AAISALKVGADLSHVFCASAAAPVIKAYSPELIVHPVLDSPNAVHEV | |
| | Symbol; Acc:HGNC: | | | EKWLPRLHALVVGPGLGRDDALLRNVQGILEVSKARDIPVVIDADG | |
| | 25576] (encoded by | | | LWLVAQQPALIHGYRKAVLTPNHVEFSRLYDAVLRGPMDSDDSHG | |
| | CARKD gene set forth | | | SVLRLSQALGNVTVVQKGERDILSNGQQVLVCSQEGSSRRCGGQG | |
| | in Table 1) | | | DLLSGSLGVLVHWALLAGPQKTNGGISDLKLTIWGPEIETGVKTRA | |
| | | | | QGSCGPRTTTPTSPHLLLSPSPQVQPSPGGRVWRLLSHQAVQPPSLP | |
| | | | | EARSLHHHLRHDRRGGGRLQQAL* | |
| NAXD | NAD(P)HX | 55739 | 238 | MLPDGPGSSLWGNPGLQTSDSPNAVHEVEKWLPRLHALVVGPGLG | 23. |
| | dehydratase | | | RDDALLRNVQGILEVSKARDIPVVIDADGLWLVAQQPALIHGYRKA | |
| | [Source:HGNC | | | VLTPNHVEFSRLYDAVLRGPMDSDDSHGSVLRLSQALGNVTVVQK | |
| | Symbol; Acc:HGNC: | | | GERDILSNGQQVLVCSQEGSSRRCGGQGDLLSGSLGVLVHWALLA | |
| | 25576] (encoded by | | | GPQKTNGSSPLLVAAFGACSLTRQCNHQAFQKHGRSTTTSDMIAEV | |
| | CARKD gene set forth | | | GAAFSKLFET* | |
| | in Table 1) | | | | |
| CSNK2A1 | casein kinase 2 alpha 1 | 1457 | 392 | MSGPVPSRARVYTDVNTHRPREYWDYESHVVEWGNQDDYQLVR | 24. |
| | [Source:HGNC | | | KLGRGKYSEVFEAINITNNEKVVVKILKPVKKKKIKREIKILENLRG | |
| | Symbol; Acc:HGNC: | | | GPNIITLADIVKDPVSRTPALVFEHVNNTDFKQLYQTLTDYDIRFYM | |
| | 2457] | | | YEILKALDYCHSMGIMHRDVKPHNVMIDHEHRKLRLIDWGLAEFY | |
| | | | | HPGQEYNVRVASRYFKGPELLVDYQMYDYSLDMWSLGCMLASMI | |
| | | | | FRKEPFFHGHDNYDQLVRIAKVLGTEDLYDYIDKYNIELDPRFNDIL | |
| | | | | GRHSRKRWERFVHSENQHLVSPEALDFLDKLLRYDHQSRLTAREA | |
| | | | | MEHPYFYTVVKDQARMGSSSMPGGSTPVSSANMMSGISSVPTPSPL | |
| | | | | GPLAGSPVIAAANPLGMPVPAAAGAQQ* | |
| CSNK2A1 | casein kinase 2 alpha 1 | 1457 | 256 | MYEILKALDYCHSMGIMHRDVKPHNVMIDHEHRKLRLIDWGLAEF | 25. |
| | [Source:HGNC | | | YHPGQEYNVRVASRYFKGPELLVDYQMYDYSLDMWSLGCMLAS | |
| | Symbol; Acc:HGNC: | | | MIFRKEPFFHGHDNYDQLVRIAKVLGTEDLYDYIDKYNIELDPRFN | |
| | 2457] | | | DILGRHSRKRWERFVHSENQHLVSPEALDFLDKLLRYDHQSRLTAR | |
| | | | | EAMEHPYFYTVVKDQARMGSSSMPGGSTPVSSANMMSGISSVPTPS | |
| | | | | PLGPLAGSPVIAAANPLGMPVPAAAGAQQ* | |
| CSNK2A1 | casein kinase 2 alpha 1 | 1457 | 386 | MSGPVPSRARVYTDVNTHRPREYWDYESHVVEWGNQDDYQLVR | 26. |
| | [Source:HGNC | | | KLGRGKYSEVFEAINITNNEKVVVKILKPVKKKKIKREIKILENLRG | |
| | Symbol; Acc:HGNC: | | | GPNIITLADIVKDPVSRTPALVFEHVNNTDFKQLYQTLTDYDIRFYM | |
| | 2457] | | | YEILKALDYCHSMGIMHRDVKPHNVMIDHEHRKLRLIDWGLAEFY | |
| | | | | HPGQEYNVRVASRYFKGPELLVDYQMYDYSLDMWSLGCMLASMI | |
| | | | | FRKEPFFHGHDNYDQLVRIAKVLGTEDLYDYIDKYNIELDPRFNDIL | |
| | | | | GRHSRKRWERFVHSENQHLVSPEALDFLDKLLRYDHQSRLTAREA | |
| | | | | MEHPYFYTVVKDQARMGSSSMPGGSTPVSSANMMSEMKFCRVAQ | |
| | | | | AGLELLSSTVYPPWPPKVLRLEA* | |
| CSNK2A1 | casein kinase 2 alpha 1 | 1457 | 43 | MYEILKALDYCHSMGIMHRDVKPHNVMIDHEHRKLRLIDWGLA | 27. |
| | [Source:HGNC | | | | |
| | Symbol; Acc:HGNC: | | | | |
| | 2457] | | | | |
| CSNK2A1 | casein kinase 2 alpha 1 | 1457 | 118 | MSGPVPSRARVYTDVNTHRPREYWDYESHVVEWGNQDDYQLVR | 28. |
| | [Source:HGNC | | | KLGRGKYSEVFEAINITNNEKVVVKILKPVKKKKIKREIKILENLRG | |
| | Symbol; Acc:HGNC: | | | GPNIITLADIVKDPVAKRLIALETEMC* | |
| | 2457] | | | | |
| CSNK2A1 | casein kinase 2 alpha 1 | 1457 | 133 | MSGPVPSRARVYTDVNTHRPREYWDYESHVVEWGNQDDYQLVR | 29. |
| | [Source:HGNC | | | KLGRGKYSEVFEAINITNNEKVVVKILKPVKKKKIKREIKILENLRG | |
| | Symbol; Acc:HGNC: | | | GPNIITLADIVKDPVSRTPALVFEHVNNTDFKQLYQTLTDYDI | |
| | 2457] | | | | |
| CSNK2A1 | casein kinase 2 alpha 1 | 1457 | 74 | MSGPVPSRARVYTDVNTHRPREYWDYESHVVEWGNQDDYQLVR | 30. |
| | [Source:HGNC | | | KLGRGKYSEVFEAINITNNEKVVVKILKPVK | |
| | Symbol; Acc:HGNC: | | | | |
| | 2457] | | | | |
| CSNK2A1 | casein kinase 2 alpha 1 | 1457 | 207 | MSGPVPSRARVYTDVNTHRPREYWDYESHVVEWGNQDDYQLVR | 31. |
| | [Source:HGNC | | | KLGRGKYSEVFEAINITNNEKVVVKILKPVKKKKIKREIKILENLRG | |
| | Symbol; Acc:HGNC: | | | GPNIITLADIVKDPVSRTPALVFEHVNNTDFKQLYQTLTDYDIRFYM | |
| | 2457] | | | YEILKALDYCHSMGIMHRDVKPHNVMIDHEHRKLRLIDWGLAEFY | |
| | | | | HPGQEYNVRVASRYFKGPELLVDYQ | |
| CSNK2A1 | casein kinase 2 alpha 1 | 1457 | 153 | MSGPVPSRARVYTDVNTHRPREYWDYESHVVEWGNQDDYQLVR | 32. |
| | [Source:HGNC | | | KLGRGKYSEVFEAINITNNEKVVVKILKYLLFTTATTANPASQKYAI | |
| | Symbol; Acc:HGNC: | | | ARSITQSITRSVTQSNVETTNHLKLAVHPVSGRFNDGLMCLPQKCK | |
| | 2457] | | | VFHSIPVHCWGASHAL* | |
| CSNK2A1 | casein kinase 2 alpha 1 | 1457 | 131 | MSGPVPSRARVYTDVNTHRPREYWDYESHVVEWGNQDDYQLVR | 33. |
| | [Source:HGNC | | | KLGRGKYSEVFEAINITNNEKVVVKILKSRTPALVFEHVNNTDFKQ | |
| | Symbol; Acc:HGNC: | | | LYQTLTDYDIRFYMYEILKALDYCHSMGIMHRDVKPHNVMID | |
| | 2457] | | | | |
| CSNK2A1 | casein kinase 2 alpha 1 | 1457 | 87 | MSGPVPSRARVYTDVNTHRPREYWDYESHVVEWGNQDDYQLVR | 34. |
| | [Source:HGNC | | | KLGRGKYSEVFEAINITNNEKVVVKILKVSTRDNFRGIWNIDF* | |
| | Symbol; Acc:HGNC: | | | | |
| | 2457] | | | | |
| CSNK2A1 | casein kinase 2 alpha 1 | 1457 | 364 | MSGPVPSRARVYTDVNTHRPREYWDYESHVVEWGNQDDYQLVR | 35. |
| | [Source:HGNC | | | KLGRGKYSEVFEAINITNNEKVVVKILKPVKKKKIKREIKILENLRG | |
| | Symbol; Acc:HGNC: | | | GPNIITLADIVKDPVSRTPALVFEHVNNTDFKQLYQTLTDYDIRFYM | |
| | 2457] | | | YEILKLRLIDWGLAEFYHPGQEYNVRVASRYFKGPELLVDYQMYD | |
| | | | | YSLDMWSLGCMLASMIFRKEPFFHGHDNYDQLVRIAKVLGTEDLY | |
| | | | | DYIDKYNIELDPRFNDILGRHSRKRWERFVHSENQHLVSPEALDFLD | |
| | | | | KLLRYDHQSRLTAREAMEHPYFYTVVKDQARMGSSSMPGGSTPVS | |
| | | | | SANMMSGISSVPTPSPLGPLAGSPVIAAANPLGMPVPAAAGAQQ* | |
| CSNK2A1 | casein kinase 2 alpha 1 | 1457 | 375 | MSGPVPSRARVYTDVNTHRPREYWDYESHVVEWGNQDDYQLVR | 36. |
| | [Source:HGNC | | | KLGRGKYSEVFEAINITNNEKVVVKILKPVKKKKIKREIKILENLRG | |
| | Symbol; Acc:HGNC: | | | GPNIITLADIVKDPVQLYQTLTDYDIRFYMYEILKALDYCHSMGIMH | |
| | 2457] | | | RDVKPHNVMIDHEHRKLRLIDWGLAEFYHPGQEYNVRVASRYFKG | |
| | | | | PELLVDYQMYDYSLDMWSLGCMLASMIFRKEPFFHGHDNYDQLV | |
| | | | | RIAKVLGTEDLYDYIDKYNIELDPRFNDILGRHSRKRWERFVHSEN | |
| | | | | QHLVSPEALDFLDKLLRYDHQSRLTAREAMEHPYFYTVVKDQARM | |
| | | | | GSSSMPGGSTPVSSANMMSGISSVPTPSPLGPLAGSPVIAAANPLGM | |
| | | | | PVPAAAGAQQ* | |
| CSNK2A1 | casein kinase 2 alpha 1 | 1457 | 89 | MSGPVPSRARVYTDVNTHRPREYWDYESHVVEWGNQDDYQLVR | 37. |
| | [Source:HGNC | | | KLGRGKYSEVFEAINITNNEKVVVKILKYLQNTWHSARRRIQRRM* | |
| | Symbol; Acc:HGNC: | | | | |
| | 2457] | | | | |
| CSNK2A1 | casein kinase 2 alpha 1 | 1457 | 34 | MSGPVPSRARVYTDVNTHRPREYWDYESHVVEWG | 38. |
| | [Source:HGNC | | | | |
| | Symbol; Acc:HGNC: | | | | |
| | 2457] | | | | |
| CSNK2A1 | casein kinase 2 alpha 1 | 1457 | 257 | MSGPVPSRARVYTDVNTHRPREYWDYESHVVEWGNQDDYQLVR | 39. |
| | [Source:HGNC | | | KLGRGKYSEVFEAINITNNEKVVVKILKPVKKKKIKREIKILENLRG | |
| | Symbol; Acc:HGNC: | | | GPNIITLADIVKDPVSRTPALVFEHVNNTDFKQLYQTLTDYDIRFYM | |
| | 2457] | | | YEILKALDYCHSMGIMHRDVKPHNVMIDHEHRKLRLIDWGLAEFY | |
| | | | | HPGQEYNVRVASRYFKGPELLVDYQMYDYSLDMWSLGCMLASMI | |
| | | | | FRKEPFFHGHDNYDQVIYVIPIEKCTGLMQ* | |
| CSNK2A1 | casein kinase 2 alpha 1 | 1457 | 119 | DYIDKYNIELDPRFNDILGRHSRKRWERFVHSENQHLVSPEALDFLD | 40. |
| | [Source:HGNC | | | KLLRYDHQSRLTAREAMEHPYFYTVVKDQARMGSSSMPGGSTPVS | |
| | Symbol; Acc:HGNC: | | | SANMMSEPQFEGQRDIHHAAVRLGQL* | |
| | 2457] | | | | |
| CSNK2A1 | casein kinase 2 alpha 1 | 1457 | 355 | MSGPVPSRARVYTDVNTHRPREYWDYESHVVEWGNQDDYQLVR | 41. |
| | [Source:HGNC | | | KLGRGKYSEVFEAINITNNEKVVVKILKPVKKKKIKREIKILENLRG | |
| | Symbol; Acc:HGNC: | | | GPNIITLADIVKDPVALDYCHSMGIMHRDVKPHNVMIDHEHRKLRL | |
| | 2457] | | | IDWGLAEFYHPGQEYNVRVASRYFKGPELLVDYQMYDYSLDMWS | |
| | | | | LGCMLASMIFRKEPFFHGHDNYDQLVRIAKVLGTEDLYDYIDKYNI | |
| | | | | ELDPRFNDILGRHSRKRWERFVHSENQHLVSPEALDFLDKLLRYDH | |
| | | | | QSRLTAREAMEHPYFYTVVKDQARMGSSSMPGGSTPVSSANMMS | |
| | | | | GISSVPTPSPLGPLAGSPVIAAANPLGMPVPAAAGAQQ* | |
| CSNK2A1 | casein kinase 2 alpha 1 | 1457 | 92 | MSGPVPSRARVYTDVNTHRPREYWDYESHVVEWGNQDDYQLVR | 42. |
| | [Source:HGNC | | | KLGRGKYSEVFEAINITNNEKVVVKILKPVKKKKIKREIKILENLRG | |
| | Symbol; Acc:HGNC: | | | GP | |
| | 2457] | | | | |
| CSNK2A1 | casein kinase 2 alpha 1 | 1457 | 95 | MSGPVPSRARVYTDVNTHRPREYWDYESHVVEWGNQDDYQLVR | 43. |
| | [Source:HGNC | | | KLGRGKYSEVFEAINITNNEKVVVKILKSQVLEGLKWEDRLSLEVE | |
| | Symbol; Acc:HGNC: | | | GCTDL* | |
| | 2457] | | | | |
| CSNK2A1 | casein kinase 2 alpha 1 | 1457 | 355 | MSGPVPSRARVYTDVNTHRPREYWDYESHVVEWGNQDDYQLVR | 44. |
| | [Source:HGNC | | | KLGRGKYSEVFEAINITNNEKVVVKILKPVKKKKIKREIKILENLRG | |
| | Symbol; Acc:HGNC: | | | GPNIITLADIVKDPVSRTPALVFEHVNNTDFKQLYQTLTDYDIRFYM | |
| | 2457] | | | YEILKALDYCHSMGIMHRDVKPHNVMIDHEHRKMYDYSLDMWSL | |
| | | | | GCMLASMIFRKEPFFHGHDNYDQLVRIAKVLGTEDLYDYIDKYNIE | |
| | | | | LDPRFNDILGRHSRKRWERFVHSENQHLVSPEALDFLDKLLRYDHQ | |
| | | | | SRLTAREAMEHPYFYTVVKDQARMGSSSMPGGSTPVSSANMMSGI | |
| | | | | SSVPTPSPLGPLAGSPVIAAANPLGMPVPAAAGAQQ* | |
| CSNK2A1 | casein kinase 2 alpha 1 | 1457 | 377 | MSGPVPSRARVYTDVNTHRPREYWDYESHVVEWGNQDDYQLVR | 45. |
| | [Source:HGNC | | | KLGRGKYSEVFEAINITNNEKVVVKILKPVKKKKIKREIKILENLRG | |
| | Symbol; Acc:HGNC: | | | GPNIITLADIVKDPVSRTPALVFEHVNNTDFKQLYQTLTDYDIRFYM | |
| | 2457] | | | YEILKALDYCHSMGIMHRDVKPHNVMIDHEHRKLRLIDWGLAEFY | |
| | | | | HPGQEYNVRVASRYFKGPELLVDYQMYDYSLDMWSLGCMLASMI | |
| | | | | FRKEPFFHGHDNYDQLVRIAKVLGTEDLYDYIDKYNIELDPRFNDIL | |
| | | | | GRHSRKRWERFVHSENQHLVSPEALDFLDKLLRYDHQSRLTAREA | |
| | | | | MEHPYFYTVVKDQARMGSSSMPGGSTPVSSANMMSALFFQGFLQC | |
| | | | | QPLHPLDLWQAHQ* | |
| CSNK2A1 | casein kinase 2 alpha 1 | 1457 | 144 | MSGPVPSRARVYTDVNTHRPREYWDYESHVVEWGNQDDYQLVR | 46. |
| | [Source:HGNC | | | KLGRGKYSEVFEAINITNNEKVVVKILKPVKKKKIKREIKILENLRG | |
| | Symbol; Acc:HGNC: | | | GPNIITLADIVKDPVSRTPALVFEHVNNTDFKQLYQTLTDYDIRFYM | |
| | 2457] | | | YEILKAL | |
| KCNG2 | potassium voltage- | 26251 | 467 | MEPWPCSPGGGGGTRARHVIINVGGCRVRLAWAALARCPLARLER | 47. |
| | gated channel modifier | | | LRACRGHDDLLRVCDDYDVSRDEFFFDRSPCAFRAIVALLRAGKLR | |
| | subfamily G member 2 | | | LLRGPCALAFRDELAYWGIDEARLERCCLRRLRRREEEAAEARAGP | |
| | [Source:HGNC | | | TERGAQGSPARALGPRGRLQRGRRRLRDVVDNPHSGLAGKLFACV | |
| | Symbol; Acc:HGNC: | | | SVSFVAVTAVGLCLSTMPDIRAEEERGECSPKCRSLFVLETVCVAW | |
| | 6249] | | | FSFEFLLRSLQAESKCAFLRAPLNIIDILALLPFYVSLLLGLAAGPGGT | |
| | | | | KLLERAGLVLRLLRALRVLYVMRLARHSLGLRSLGLTMRRCAREF | |
| | | | | GLLLLFLCVAMALFAPLVHLAERELGARRDFSSVPASYWWAVISM | |
| | | | | TTVGYGDMVPRSLPGQVVALSSILSGILLMAFPVTSIFHTFSRSYSEL | |
| | | | | KEQQQRAASPEPALQEDSTHSATATEDSSQGPDSAGLADDSADAL | |
| | | | | WVRAGR* | |
| FAM122A | family with sequence | 116224 | 288 | MAQEKMELDLELPPGTGGSPAEGGGSGGGGGLRRSNSAPLIHGLSD | 48. |
| | similarity 122 A | | | TSPVFQAEAPSARRNSTTFPSRHGLLLPASPVRMHSSRLHQIKQEEG | |
| | [Source:HGNC | | | MDLINRETVHEREVQTAMQISHSWEESFSLSDNDVEKSASPKRIDFI | |
| | Symbol; Acc:HGNC: | | | PVSPAPSPTRGIGKQCFSPSLQSFVSSNGLPPSPIPSPTTRFTTRRSQSP | |
| | 23490] | | | INCIRPSVLGPLKRKCEMETEYQPKRFFQGITNMLSSDVAQLSDPGV | |
| | | | | CVSSDTLDGNSSSAGSSCNSPAKVSTTTDSPVSPAQAASPFIPLDELS | |
| | | | | SK* | |
| MGA | MAX dimerization | 23269 | 3066 | MEEKQQIILANQDGGTVAGAAPTFFVILKQPGNGKTDQGILVTNQD | 49. |
| | protein MGA | | | ACALASSVSSPVKSKGKICLPADCTVGGITVTLDNNSMWNEFYHRS | |
| | [Source:HGNC | | | TEMILTKQGRRMFPYCRYWITGLDSNLKYILVMDISPVDNHRYKW | |
| | Symbol; Acc:HGNC: | | | NGRWWEPSGKAEPHVLGRVFIHPESPSTGHYWMHQPVSFYKLKLT | |
| | 14010] | | | NNTLDQEGHIILHSMHRYLPRLHLVPAEKAVEVIQLNGPGVHTFTFP | |
| | | | | QTEFFAVTAYQNIQITQLKIDYNPFAKGFRDDGLNNKPQRDGKQKN | |
| | | | | SSDQEGNNISSSSGHRVRLTEGQGSEIQPGDLDPLSRGHETSGKGLE | |
| | | | | KTSLNIKRDFLGFMDTDSALSEVPQLKQEISECLIASSFEDDSRVASP | |
| | | | | LDQNGSFNVVIKEEPLDDYDYELGECPEGVTVKQEETDEETDVYSN | |
| | | | | SDDDPILEKQLKRHNKVDNPEADHLSSKWLPSSPSGVAKAKMFKL | |
| | | | | DTGKMPVVYLEPCAVTRSTVKISELPDNMLSTSRKDKSSMLAELEY | |
| | | | | LPTYIENSNETAFCLGKESENGLRKHSPDLRVVQKYPLLKEPQWKY | |
| | | | | PDISDSISTERILDDSKDSVGDSLSGKEDLGRKRTTMLKIATAAKVV | |
| | | | | NANQNASPNVPGKRGRPRKLKLCKAGRPPKNTGKSLISTKNTPVSP | |
| | | | | GSTFPDVKPDLEDVDGVLFVSFESKEALDIHAVDGTTEESSSLQAST | |
| | | | | TNDSGYRARISQLEKELIEDLKTLRHKQVIHPGLQEVGLKLNSVDPT | |
| | | | | MSIDLKYLGVQLPLAPATSFPFWNLTGTNPASPDAGFPFVSRTGKT | |
| | | | | NDFTKIKGWRGKFHSASASRNEGGNSESSLKNRSAFCSDKLDEYLE | |
| | | | | NEGKLMETSMGFSSNAPTSPVVYQLPTKSTSYVRTLDSVLKKQSTIS | |
| | | | | PSTSYSLKPHSVPPVSRKAKSQNRQATFSGRTKSSYKSILPYPVSPKQ | |
| | | | | KYSHVILGDKVTKNSSGIISENQANNFVVPTLDENIFPKQISLRQAQQ | |
| | | | | QQQQQQGSRPPGLSKSQVKLMDLEDCALWEGKPRTYITEERADVS | |
| | | | | LTTLLTAQASLKTKPIHTIIRKRAPPCNNDFCRLGCVCSSLALEKRQP | |
| | | | | AHCRRPDCMFGCTCLKRKVVLVKGGSKTKHFQRKAAHRDPVFYD | |
| | | | | TLGEEAREEEEGIREEEEQLKEKKKRKKLEYTICETEPEQPVRHYPL | |
| | | | | WVKVEGEVDPEPVYIPTPSVIEPMKPLLLPQPEVLSPTVKGKLLTGI | |
| | | | | KSPRSYTPKPNPVIREEDKDPVYLYFESMMTCARVRVYERKKEDQR | |
| | | | | QPSSSSSPSPSFQQQTSCHSSPENHNNAKEPDSEQQPLKQLTCDLED | |
| | | | | DSDKLQEKSWKSSCNEGESSSTSYMHQRSPGGPTKLIEIISDCNWEE | |
| | | | | DRNKILSILSQHINSNMPQSLKVGSFIIELASQRKSRGEKNPPVYSSR | |
| | | | | VKISMPSCQDQDDMAEKSGSETPDGPLSPGKMEDISPVQTDALDSV | |
| | | | | RERLHGGKGLPFYAGLSPAGKLVAYKRKPSSSTSGLIQVASNAKVA | |
| | | | | ASRKPRTLLPSTSNSKMASSSGTATNRPGKNLKAFVPAKRPIAARPS | |
| | | | | PGGVFTQFVMSKVGALQQKIPGVSTPQTLAGTQKFSIRPSPVMVVT | |
| | | | | PVVSSEPVQVCSPVTAAVTTTTPQVFLENTTAVTPMTAISDVETKET | |
| | | | | TYSSGATTTGVVEVSETNTSTSVTSTQSTATVNLTKTTGITTPVASV | |
| | | | | AFPKSLVASPSTITLPVASTASTSLVVVTAAASSSMVTTPTSSLGSVP | |
| | | | | IILSGINGSPPVSQRPENAAQIPVATPQVSPNTVKRAGPRLLLIPVQQ | |
| | | | | GSPTLRPVSNTQLQGHRMVLQPVRSPSGMNLFRHPNGQIVQLLPLH | |
| | | | | QLRGSNTQPNLQPVMFRNPGSVMGIRLPAPSKPSETPPSSTSSSAFSV | |
| | | | | MNPVIQAVGSSSAVNVITQAPSLLSSGASFVSQAGTLTLRISPPEPQS | |
| | | | | FASKTGSETKITYSSGGQPVGTASLIPLQSGSFALLQLPGQKPVPSSIL | |
| | | | | QHVASLQMKRESQNPDQKDETNSIKREQETKKVLQSEGEAVDPEA | |
| | | | | NVIKQNSGAATSEETLNDSLEDRGDHLDEECLPEEGCATVKPSEHS | |
| | | | | CITGSHTDQDYKDVNEEYGARNRKSSKEKVAVLEVRTISEKASNKT | |
| | | | | VQNLSKVQHQKLGDVKVEQQKGFDNPEENSSEFPVTFKEESKFELS | |
| | | | | GSKVMEQQSNLQPEAKEKECGDSLEKDRERWRKHLKGPLTRKCV | |
| | | | | GASQECKKEADEQLIKETKTCQENSDVFQQEQGISDLLGKSGITEDA | |
| | | | | RVLKTECDSWSRISNPSAFSIVPRRAAKSSRGNGHFQGHLLLPGEQI | |
| | | | | QPKQEKKGGRSSADFTVLDLEEDDEDDNEKTDDSIDEIVDVVSDYQ | |
| | | | | SEEVDDVEKNNCVEYIEDDEEHVDIETVEELSEEINVAHLKTTAAHT | |
| | | | | QSFKQPSCTHISADEKAAERSRKAPPIPLKLKPDYWSDKLQKEAEAF | |
| | | | | AYYRRTHTANERRRRGEMRDLFEKLKITLGLLHSSKVSKSLILTRAF | |
| | | | | SEIQGLTDQADKLIGQKNLLTRKRNILIRKVSSLSGKTEEVVLKKLE | |
| | | | | YIYAKQQALEAQKRKKKMGSDEFDISPRISKQQEGSSASSVDLGQM | |
| | | | | FINNRRGKPLILSRKKDQATENTSPLNTPHTSANLVMTPQGQLLTLK | |
| | | | | GPLFSGPVVAVSPDLLESDLKPQVAGSAVALPENDDLFMMPRIVNV | |
| | | | | TSLATEGGLVDMGGSKYPHEVPDSKPSDHLKDTVRNEDNSLEDKG | |
| | | | | RISSRGNRDGRVTLGPTQVFLANKDSGYPQIVDVSNMQKAQEFLPK | |
| | | | | KISGDMRGIQYKWKESESRGERVKSKDSSFHKLKMKDLKDSSIEME | |
| | | | | LRKVTSAIEEAALDSSELLTNMEDEDDTDETLTSLLNEIAFLNQQLN | |
| | | | | DDSVGLAELPSSMDTEFPGDARRAFISKVPPGSRATFQVEHLGTGL | |
| | | | | KELPDVQGESDSISPLLLHLEDDDFSENEKQLAEPASEPDVLKIVIDS | |
| | | | | EIKDSLLSNKKAIDGGKNTSGLPAEPESVSSPPTLHMKTGLENSNST | |
| | | | | DTLWRPMPKLAPLGLKVANPSSDADGQSLKVMPCLAPIAAKVGSV | |
| | | | | GHKMNLTGNDQEGRESKVMPTLAPVVAKLGNSGASPSSAGK* | |
| MGA | MAX dimerization | 23269 | 1138 | MEEKQQIILANQDGGTVAGAAPTFFVILKQPGNGKTDQGILVTNQD | 50. |
| | protein MGA | | | ACALASSVSSPVKSKGKICLPADCTVGGITVTLDNNSMWNEFYHRS | |
| | [Source:HGNC | | | TEMILTKQGRRMFPYCRYWITGLDSNLKYILVMDISPVDNHRYKW | |
| | Symbol; Acc:HGNC: | | | NGRWWEPSGKAEPHVLGRVFIHPESPSTGHYWMHQPVSFYKLKLT | |
| | 14010] | | | NNTLDQEGHIILHSMHRYLPRLHLVPAEKAVEVIQLNGPGVHTFTFP | |
| | | | | QTEFFAVTAYQNIQITQLKIDYNPFAKGFRDDGLNNKPQRDGKQKN | |
| | | | | SSDQEGNNISSSSGHRVRLTEGQGSEIQPGDLDPLSRGHETSGKGLE | |
| | | | | KTSLNIKRDFLGFMDTDSALSEVPQLKQEISECLIASSFEDDSRVASP | |
| | | | | LDQNGSFNVVIKEEPLDDYDYELGECPEGVTVKQEETDEETDVYSN | |
| | | | | SDDDPILEKQLKRHNKVDNPEADHLSSKWLPSSPSGVAKAKMFKL | |
| | | | | DTGKMPVVYLEPCAVTRSTVKISELPDNMLSTSRKDKSSMLAELEY | |
| | | | | LPTYIENSNETAFCLGKESENGLRKHSPDLRVVQKYPLLKEPQWKY | |
| | | | | PDISDSISTERILDDSKDSVGDSLSGKEDLGRKRTTMLKIATAAKVV | |
| | | | | NANQNASPNVPGKRGRPRKLKLCKAGRPPKNTGKSLISTKNTPVSP | |
| | | | | GSTFPDVKPDLEDVDGVLFVSFESKEALDIHAVDGTTEESSSLQAST | |
| | | | | TNDSGYRARISQLEKELIEDLKTLRHKQVIHPGLQEVGLKLNSVDPT | |
| | | | | MSIDLKYLGVQLPLAPATSFPFWNLTGTNPASPDAGFPFVSRTGKT | |
| | | | | NDFTKIKGWRGKFHSASASRNEGGNSESSLKNRSAFCSDKLDEYLE | |
| | | | | NEGKLMETSMGFSSNAPTSPVVYQLPTKSTSYVRTLDSVLKKQSTIS | |
| | | | | PSTSYSLKPHSVPPVSRKAKSQNRQATFSGRTKSSYKSILPYPVSPKQ | |
| | | | | KYSHVILGDKVTKNSSGIISENQANNFVVPTLDENIFPKQISLRQAQQ | |
| | | | | QQQQQQGSRPPGLSKSQVKLMDLEDCALWEGKPRTYITEERADVS | |
| | | | | LTTLLTAQASLKTKPIHTIIRKRAPPCNNDFCRLGCVCSSLALEKRQP | |
| | | | | AHCRRPDCMFGCTCLKRKVVLVKGGSKTKHFQRKAAHRDPVFYD | |
| | | | | TLGEEAREEEEGIREEEEQLKEKKKR | |
| MGA | MAX dimerization | 23269 | 2857 | MEEKQQIILANQDGGTVAGAAPTFFVILKQPGNGKTDQGILVTNQD | 51. |
| | protein MGA | | | ACALASSVSSPVKSKGKICLPADCTVGGITVTLDNNSMWNEFYHRS | |
| | [Source:HGNC | | | TEMILTKQGRRMFPYCRYWITGLDSNLKYILVMDISPVDNHRYKW | |
| | Symbol; Acc:HGNC: | | | NGRWWEPSGKAEPHVLGRVFIHPESPSTGHYWMHQPVSFYKLKLT | |
| | 14010] | | | NNTLDQEGHIILHSMHRYLPRLHLVPAEKAVEVIQLNGPGVHTFTFP | |
| | | | | QTEFFAVTAYQNIQITQLKIDYNPFAKGFRDDGLNNKPQRDGKQKN | |
| | | | | SSDQEGNNISSSSGHRVRLTEGQGSEIQPGDLDPLSRGHETSGKGLE | |
| | | | | KTSLNIKRDFLGFMDTDSALSEVPQLKQEISECLIASSFEDDSRVASP | |
| | | | | LDQNGSFNVVIKEEPLDDYDYELGECPEGVTVKQEETDEETDVYSN | |
| | | | | SDDDPILEKQLKRHNKVDNPEADHLSSKWLPSSPSGVAKAKMFKL | |
| | | | | DTGKMPVVYLEPCAVTRSTVKISELPDNMLSTSRKDKSSMLAELEY | |
| | | | | LPTYIENSNETAFCLGKESENGLRKHSPDLRVVQKYPLLKEPQWKY | |
| | | | | PDISDSISTERILDDSKDSVGDSLSGKEDLGRKRTTMLKIATAAKVV | |
| | | | | NANQNASPNVPGKRGRPRKLKLCKAGRPPKNTGKSLISTKNTPVSP | |
| | | | | GSTFPDVKPDLEDVDGVLFVSFESKEALDIHAVDGTTEESSSLQAST | |
| | | | | TNDSGYRARISQLEKELIEDLKTLRHKQVIHPGLQEVGLKLNSVDPT | |
| | | | | MSIDLKYLGVQLPLAPATSFPFWNLTGTNPASPDAGFPFVSRTGKT | |
| | | | | NDFTKIKGWRGKFHSASASRNEGGNSESSLKNRSAFCSDKLDEYLE | |
| | | | | NEGKLMETSMGFSSNAPTSPVVYQLPTKSTSYVRTLDSVLKKQSTIS | |
| | | | | PSTSYSLKPHSVPPVSRKAKSQNRQATFSGRTKSSYKSILPYPVSPKQ | |
| | | | | KYSHVILGDKVTKNSSGIISENQANNFVVPTLDENIFPKQISLRQAQQ | |
| | | | | QQQQQQGSRPPGLSKSQVKLMDLEDCALWEGKPRTYITEERADVS | |
| | | | | LTTLLTAQASLKTKPIHTIIRKRAPPCNNDFCRLGCVCSSLALEKRQP | |
| | | | | AHCRRPDCMFGCTCLKRKVVLVKGGSKTKHFQRKAAHRDPVFYD | |
| | | | | TLGEEAREEEEGIREEEEQLKEKKKRKKLEYTICETEPEQPVRHYPL | |
| | | | | WVKVEGEVDPEPVYIPTPSVIEPMKPLLLPQPEVLSPTVKGKLLTGI | |
| | | | | KSPRSYTPKPNPVIREEDKDPVYLYFESMMTCARVRVYERKKEDQR | |
| | | | | QPSSSSSPSPSFQQQTSCHSSPENHNNAKEPDSEQQPLKQLTCDLED | |
| | | | | DSDKLQEKSWKSSCNEGESSSTSYMHQRSPGGPTKLIEIISDCNWEE | |
| | | | | DRNKILSILSQHINSNMPQSLKVGSFIIELASQRKSRGEKNPPVYSSR | |
| | | | | VKISMPSCQDQDDMAEKSGSETPDGPLSPGKMEDISPVQTDALDSV | |
| | | | | RERLHGGKGLPFYAGLSPAGKLVAYKRKPSSSTSGLIQVASNAKVA | |
| | | | | ASRKPRTLLPSTSNSKMASSSGTATNRPGKNLKAFVPAKRPIENAA | |
| | | | | QIPVATPQVSPNTVKRAGPRLLLIPVQQGSPTLRPVSNTQLQGHRM | |
| | | | | VLQPVRSPSGMNLFRHPNGQIVQLLPLHQLRGSNTQPNLQPVMFRN | |
| | | | | PGSVMGIRLPAPSKPSETPPSSTSSSAFSVMNPVIQAVGSSSAVNVIT | |
| | | | | QAPSLLSSGASFVSQAGTLTLRISPPEPQSFASKTGSETKITYSSGGQP | |
| | | | | VGTASLIPLQSGSFALLQLPGQKPVPSSILQHVASLQMKRESQNPDQ | |
| | | | | KDETNSIKREQETKKVLQSEGEAVDPEANVIKQNSGAATSEETLND | |
| | | | | SLEDRGDHLDEECLPEEGCATVKPSEHSCITGSHTDQDYKDVNEEY | |
| | | | | GARNRKSSKEKVAVLEVRTISEKASNKTVQNLSKVQHQKLGDVKV | |
| | | | | EQQKGFDNPEENSSEFPVTFKEESKFELSGSKVMEQQSNLQPEAKE | |
| | | | | KECGDSLEKDRERWRKHLKGPLTRKCVGASQECKKEADEQLIKET | |
| | | | | KTCQENSDVFQQEQGISDLLGKSGITEDARVLKTECDSWSRISNPSA | |
| | | | | FSIVPRRAAKSSRGNGHFQGHLLLPGEQIQPKQEKKGGRSSADFTVL | |
| | | | | DLEEDDEDDNEKTDDSIDEIVDVVSDYQSEEVDDVEKNNCVEYIED | |
| | | | | DEEHVDIETVEELSEEINVAHLKTTAAHTQSFKQPSCTHISADEKAA | |
| | | | | ERSRKAPPIPLKLKPDYWSDKLQKEAEAFAYYRRTHTANERRRRGE | |
| | | | | MRDLFEKLKITLGLLHSSKVSKSLILTRAFSEIQGLTDQADKLIGQK | |
| | | | | NLLTRKRNILIRKVSSLSGKTEEVVLKKLEYIYAKQQALEAQKRKK | |
| | | | | KMGSDEFDISPRISKQQEGSSASSVDLGQMFINNRRGKPLILSRKKD | |
| | | | | QATENTSPLNTPHTSANLVMTPQGQLLTLKGPLFSGPVVAVSPDLL | |
| | | | | ESDLKPQVAGSAVALPENDDLFMMPRIVNVTSLATEGGLVDMGGS | |
| | | | | KYPHEVPDSKPSDHLKDTVRNEDNSLEDKGRISSRGNRDGRVTLGP | |
| | | | | TQVFLANKDSGYPQIVDVSNMQKAQEFLPKKISGDMRGIQYKWKE | |
| | | | | SESRGERVKSKDSSFHKLKMKDLKDSSIEMELRKVTSAIEEAALDSS | |
| | | | | ELLTNMEDEDDTDETLTSLLNEIAFLNQQLNDDSVGLAELPSSMDT | |
| | | | | EFPGDARRAFISKVPPGSRATFQVEHLGTGLKELPDVQGESDSISPLL | |
| | | | | LHLEDDDFSENEKQLAEPASEPDVLKIVIDSEIKDSLLSNKKAIDGG | |
| | | | | KNTSGLPAEPESVSSPPTLHMKTGLENSNSTDTLWRPMPKLAPLGL | |
| | | | | KVANPSSDADGQSLKVMPCLAPIAAKVGSVGHKMNLTGNDQEGR | |
| | | | | ESKVMPTLAPVVAKLGNSGASPSSAGK* | |
| MGA | MAX dimerization | 23269 | 1174 | XLTCDLEDDSDKLQEKSWKSSCNEGESSSTSYMHQRSPGGPTKLIEI | 52. |
| | protein MGA | | | ISDCNWEEDRNKILSILSQHINSNMPQSLKVNGKSYPQAKLLLGQM | |
| | [Source:HGNC | | | GALHPANRLAAYITGRLRPSVLDLSTLSTVISKVASNAKVAASRKPR | |
| | Symbol; Acc:HGNC: | | | TLLPSTSNSKMASSSGTATNRPGKNLKAFVPAKRPIAARPSPGGVFT | |
| | 14010] | | | QFVMSKVGALQQKIPGVSTPQTLAGTQKFSIRPSPVMVVTPVVSSEP | |
| | | | | VQVCSPVTAAVTTTTPQVFLENTTAVTPMTAISDVETKETTYSSGA | |
| | | | | TTTGVVEVSETNTSTSVTSTQSTATVNLTKTTGITTPVASVAFPKSL | |
| | | | | VASPSTITLPVASTASTSLVVVTAAASSSMVTTPTSSLGSVPIILSGIN | |
| | | | | GSPPVSQRPENAAQIPVATPQVSPNTVKRAGPRLLLIPVQQGSPTLR | |
| | | | | PVSNTQLQGHRMVLQPVRSPSGMNLFRHPNGQIVQLLPLHQLRGSN | |
| | | | | TQPNLQPVMFRNPGSVMGIRLPAPSKPSETPPSSTSSSAFSVMNPVIQ | |
| | | | | AVGSSSAVNVITQAPSLLSSGASFVSQAGTLTLRISPPEPQSFASKTG | |
| | | | | SETKITYSSGGQPVGTASLIPLQSGSFALLQLPGQKPVPSSILQHVAS | |
| | | | | LQMKRESQNPDQKDETNSIKREQETKKVLQSEGEAVDPEANVIKQ | |
| | | | | NSGAATSEETLNDSLEDRGDHLDEECLPEEGCATVKPSEHSCITGSH | |
| | | | | TDQDYKDVNEEYGARNRKSSKEKVAVLEVRTISEKASNKTVQNLS | |
| | | | | KVQHQKLGDVKVEQQKGFDNPEENSSEFPVTFKEESKFELSGSKV | |
| | | | | MEQQSNLQPEAKEKECGDSLEKDRERWRKHLKGPLTRKCVGASQE | |
| | | | | CKKEADEQLIKETKTCQENSDVFQQEQGISDLLGKSGITEDARVLKT | |
| | | | | ECDSWSRISNPSAFSIVPRRAAKSSRGNGHFQGHLLLPGEQIQPKQE | |
| | | | | KKGGRSSADFTVLDLEEDDEDDNEKTDDSIDEIVDVVSDYQSEEVD | |
| | | | | DVEKNNCVEYIEDDEEHVDIETVEELSEEINVAHLKTTAAHTQSFK | |
| | | | | QPSCTHISADEKAAERSRKAPPIPLKLKPDYWSDKLQKEAEAFAYY | |
| | | | | RRTHTANERRRRGEMRDLFEKLKITLGLLHSSKVSKSLILTRAFSEIQ | |
| | | | | GLTDQADKLIGQKNLLTRKRNILIRKVSSLSGKTEEVVLKKLEYIYA | |
| | | | | KQQALEA | |
| MGA | MAX dimerization | 23269 | 62 | MKFLFLFFLRQSLTLSPRLECSGAVLAHCKLCLPGLRHCPAPATREA | 53. |
| | protein MGA | | | EAREWLETRSRRLQ* | |
| | [Source:HGNC | | | | |
| | Symbol; Acc:HGNC: | | | | |
| | 14010] | | | | |
| MGA | MAX dimerization | 23269 | 1086 | MEEKQQIILANQDGGTVAGAAPTFFVILKQPGNGKTDQGILVTNQD | 54. |
| | protein MGA | | | ACALASSVSSPVKSKGKICLPADCTVGGITVTLDNNSMWNEFYHRS | |
| | [Source:HGNC | | | TEMILTKQGRRMFPYCRYWITGLDSNLKYILVMDISPVDNHRYKW | |
| | Symbol; Acc:HGNC: | | | NGRWWEPSGKAEPHVLGRVFIHPESPSTGHYWMHQPVSFYKLKLT | |
| | 14010] | | | NNTLDQEGHIILHSMHRYLPRLHLVPAEKAVEVIQLNGPGVHTFTFP | |
| | | | | QTEFFAVTAYQNIQITQLKIDYNPFAKGFRDDGLNNKPQRDGKQKN | |
| | | | | SSDQEGNNISSSSGHRVRLTEGQGSEIQPGDLDPLSRGHETSGKGLE | |
| | | | | KTSLNIKRDFLGFMDTDSALSEVPQLKQEISECLIASSFEDDSRVASP | |
| | | | | LDQNGSFNVVIKEEPLDDYDYELGECPEGVTVKQEETDEETDVYSN | |
| | | | | SDDDPILEKQLKRHNKVDNPEADHLSSKWLPSSPSGVAKAKMFKL | |
| | | | | DTGKMPVVYLEPCAVTRSTVKISELPDNMLSTSRKDKSSMLAELEY | |
| | | | | LPTYIENSNETAFCLGKESENGLRKHSPDLRVVQKYPLLKEPQWKY | |
| | | | | PDISDSISTERILDDSKDSVGDSLSGKEDLGRKRTTMLKIATAAKVV | |
| | | | | NANQNASPNVPGKRGRPRKLKLCKAGRPPKNTGKSLISTKNTPVSP | |
| | | | | GSTFPDVKPDLEDVDGVLFVSFESKEALDIHAVDGTTEESSSLQAST | |
| | | | | TNDSGYRARISQLEKELIEDLKTLRHKQVIHPGLQEVGLKLNSVDPT | |
| | | | | MSIDLKYLGVQLPLAPATSFPFWNLTGTNPASPDAGFPFVSRTGKT | |
| | | | | NDFTKIKGWRGKFHSASASRNEGGNSESSLKNRSAFCSDKLDEYLE | |
| | | | | NEGKLMETSMGFSSNAPTSPVVYQLPTKSTSYVRTLDSVLKKQSTIS | |
| | | | | PSTSYSLKPHSVPPVSRKAKSQNRQATFSGRTKSSYKSILPYPVSPKQ | |
| | | | | KYSHVILGDKVTKNSSGIISENQANNFVVPTLDENIFPKQISLRQAQQ | |
| | | | | QQQQQQGSRPPGLSKSQVKLMDLEDCALWEGKPRTYITEERADVS | |
| | | | | LTTLLTAQASLKTKPIHTIIRKRAPPCNNDFCRLGCVCSSLALEKRQP | |
| | | | | AHCRRPDCMFGCTCLKRK | |
| MGA | MAX dimerization | 23269 | 84 | XDQEGNNISSSSGHRVRLTEGQGSEIQPGDLDPLSRGHETSGKGLEK | 55. |
| | protein MGA | | | TSLNIKRDFLGFMDTDSALSEVPQLKQEISEWYSFA* | |
| | [Source:HGNC | | | | |
| | Symbol; Acc:HGNC: | | | | |
| | 14010] | | | | |
| G2E3 | G2/M-phase specific E3 | 55632 | 707 | MNESKPGDSQNLACVFCRKHDDCPNKYGEKKTKEKWNLTVHYYC | 56. |
| | ubiquitin protein ligase | | | LLMSSGIWQRGKEEEGVYGFLIEDIRKEVNRASKLKCCVCKKNGAS | |
| | [Source:HGNC | | | IGCVAPRCKRSYHFPCGLQRECIFQFTGNFASFCWDHRPVQIITSNN | |
| | Symbol; Acc:HGNC: | | | YRESLPCTICLEFIEPIPSYNILRSPCCKNAWFHRDCLQVQAINAGVF | |
| | 20338] | | | FFRCTICNNSDIFQKEMLRMGIHIPEKDASWELEENAYQELLQHYER | |
| | | | | CDVRRCRCKEGRDYNAPDSKWEIKRCQCCGSSGTHLACSSLRSWE | |
| | | | | QNWECLECRGIIYNSGEFQKAKKHVLPNSNNVGITDCLLEESSPKLP | |
| | | | | RQSPGSQSKDLLRQGSKFRRNVSTLLIELGFQIKKKTKRLYINKANI | |
| | | | | WNSALDAFRNRNFNPSYAIEVAYVIENDNFGSEHPGSKQEFLSLLM | |
| | | | | QHLENSSLFEGSLSKNLSLNSQALKENLYYEAGKMLAISLVHGGPS | |
| | | | | PGFFSKTLFNCLVYGPENTQPILDDVSDFDVAQIIIRINTATTVADLK | |
| | | | | SIINECYNYLELIGCLRLITTLSDKYMLVKDILGYHVIQRVHTPFESF | |
| | | | | KQGLKTLGVLEKIQAYPEAFCSILCHKPESLSAKILSELFTVHTLPDV | |
| | | | | KALGFWNSYLQAVEDGKSTTTMEDILIFATGCSSIPPAGFKPTPSIEC | |
| | | | | LHVDFPVGNKCNNCLAIPITNTYKEFQENMDFTIRNTLRLEKEESSH | |
| | | | | YIGH* | |
| G2E3 | G2/M-phase specific E3 | 55632 | 661 | MSSGIWQRGKEEEGVYGFLIEDIRKEVNRASKLKCCVCKKNGASIG | 57. |
| | ubiquitin protein ligase | | | CVAPRCKRSYHFPCGLQRECIFQFTGNFASFCWDHRPVQIITSNNYR | |
| | [Source:HGNC | | | ESLPCTICLEFIEPIPSYNILRSPCCKNAWFHRDCLQVQAINAGVFFFR | |
| | Symbol; Acc:HGNC: | | | CTICNNSDIFQKEMLRMGIHIPEKDASWELEENAYQELLQHYERCD | |
| | 20338] | | | VRRCRCKEGRDYNAPDSKWEIKRCQCCGSSGTHLACSSLRSWEQN | |
| | | | | WECLECRGIIYNSGEFQKAKKHVLPNSNNVGITDCLLEESSPKLPRQ | |
| | | | | SPGSQSKDLLRQGSKFRRNVSTLLIELGFQIKKKTKRLYINKANIWN | |
| | | | | SALDAFRNRNFNPSYAIEVAYVIENDNFGSEHPGSKQEFLSLLMQHL | |
| | | | | ENSSLFEGSLSKNLSLNSQALKENLYYEAGKMLAISLVHGGPSPGFF | |
| | | | | SKTLFNCLVYGPENTQPILDDVSDFDVAQIIIRINTATTVADLKSIINE | |
| | | | | CYNYLELIGCLRLITTLSDKYMLVKDILGYHVIQRVHTPFESFKQGL | |
| | | | | KTLGVLEKIQAYPEAFCSILCHKPESLSAKILSELFTVHTLPDVKALG | |
| | | | | FWNSYLQAVEDGKSTTTMEDILIFATGCSSIPPAGFKPTPSIECLHVD | |
| | | | | FPVGNKCNNCLAIPITNTYKEFQENMDFTIRNTLRLEKEESSHYIGH* | |
| G2E3 | G2/M-phase specific E3 | 55632 | 176 | MNESKPGDSQNLACVFCRKHDDCPNKYGEKKTKEKWNLTVHYYC | 58. |
| | ubiquitin protein ligase | | | LLMSSGIWQRGKEEEGVYGFLIEDIRKEVNRASKLKCCVCKKNGAS | |
| | [Source:HGNC | | | IGCVAPRCKRSYHFPCGLQRECIFQFTGNFASFCWDHRPVQIITSNN | |
| | Symbol; Acc:HGNC: | | | YRESLPCTICLEFIEPIPSYNILRSPCCKNAWFHRDCLQ | |
| | 20338] | | | | |
| G2E3 | G2/M-phase specific E3 | 55632 | 102 | XCRCKEGRDYNAPDSKWEIKRCQCCGSSGTHLACSSLRSWEQNWE | 59. |
| | ubiquitin protein ligase | | | CLECRGIIYNSGEFQKAKKHVLPNSNNVGITDCLLEESSPKLPRQSP | |
| | [Source:HGNC | | | GSQSKDLLR* | |
| | Symbol; Acc:HGNC: | | | | |
| | 20338] | | | | |
| G2E3 | G2/M-phase specific E3 | 55632 | 352 | MNESKPGDSQNLACVFCRKHDDCPNKYGEKKTKEKWNLTVHYYC | 60. |
| | ubiquitin protein ligase | | | LLMSSGIWQRGKEEEGVYGFLIEDIRKEVNRASKLKCCVCKKNGAS | |
| | [Source:HGNC | | | IGCVAPRCKRSYHFPCGLQRECIFQFTGNFASFCWDHRPVQIITSNN | |
| | Symbol; Acc:HGNC: | | | YRESLPCTICLEFIEPIPSYNILRSPCCKNAWFHRDCLQVQAINAGVF | |
| | 20338] | | | FFRCTICNNSDIFQKEMLRMGIHIPEKDASWELEENAYQELLQHYER | |
| | | | | CDVRRCRCKEGRDYNAPDSKWEIKRCQCCGSSGTHLACSSLRSWE | |
| | | | | QNWECLECRGIIYNSGEFQKAKKHVLPNSNNVGITDCLLEESSPKLP | |
| | | | | RQSPGSQSKDLLRNKVSLCYPGWSTVA* | |
| G2E3 | G2/M-phase specific E3 | 55632 | 121 | MNESKPGDSQNLACVFCRKHDDCPNKYGEKKTKEKWNLTVHYYC | 61. |
| | ubiquitin protein ligase | | | LLMSSGIWQRGKEEEGVYGFLIEDIRKEVNRASKLKCCVCKKNGAS | |
| | [Source:HGNC | | | IGCVAPRCKRSYHFPCGLQRECIFQFTGNFA | |
| | Symbol; Acc:HGNC: | | | | |
| | 20338] | | | | |
| G2E3 | G2/M-phase specific E3 | 55632 | 737 | MLIPALQISDSESVGLEDGIEQSAYLTESKMNESKPGDSQNLACVFC | 62. |
| | ubiquitin protein ligase | | | RKHDDCPNKYGEKKTKEKWNLTVHYYCLLMSSGIWQRGKEEEGV | |
| | [Source:HGNC | | | YGFLIEDIRKEVNRASKLKCCVCKKNGASIGCVAPRCKRSYHFPCG | |
| | Symbol; Acc:HGNC: | | | LQRECIFQFTGNFASFCWDHRPVQIITSNNYRESLPCTICLEFIEPIPSY | |
| | 20338] | | | NILRSPCCKNAWFHRDCLQVQAINAGVFFFRCTICNNSDIFQKEMLR | |
| | | | | MGIHIPEKDASWELEENAYQELLQHYERCDVRRCRCKEGRDYNAP | |
| | | | | DSKWEIKRCQCCGSSGTHLACSSLRSWEQNWECLECRGIIYNSGEF | |
| | | | | QKAKKHVLPNSNNVGITDCLLEESSPKLPRQSPGSQSKDLLRQGSKF | |
| | | | | RRNVSTLLIELGFQIKKKTKRLYINKANIWNSALDAFRNRNFNPSYA | |
| | | | | IEVAYVIENDNFGSEHPGSKQEFLSLLMQHLENSSLFEGSLSKNLSL | |
| | | | | NSQALKENLYYEAGKMLAISLVHGGPSPGFFSKTLFNCLVYGPENT | |
| | | | | QPILDDVSDFDVAQIIIRINTATTVADLKSIINECYNYLELIGCLRLITT | |
| | | | | LSDKYMLVKDILGYHVIQRVHTPFESFKQGLKTLGVLEKIQAYPEA | |
| | | | | FCSILCHKPESLSAKILSELFTVHTLPDVKALGFWNSYLQAVEDGKS | |
| | | | | TTTMEDILIFATGCSSIPPAGFKPTPSIECLHVDFPVGNKCNNCLAIPI | |
| | | | | TNTYKEFQENMDFTIRNTLRLEKEESSHYIGH* | |
| G2E3 | G2/M-phase specific E3 | 55632 | 131 | MNESKPGDSQNLACVFCRKHDDCPNKYGEKKTKEKWNLTVHYYC | 63. |
| | ubiquitin protein ligase | | | LLMSSGIWQRGKEEEGVYGFLIEDIRKEVNRASKLKCCVCKKNGAS | |
| | [Source:HGNC | | | IGCVAPRCKRSYHFPCGLQRECIFQFTGNFASFCWDHRPVQ | |
| | Symbol; Acc:HGNC: | | | | |
| | 20338] | | | | |
| G2E3 | G2/M-phase specific E3 | 55632 | 79 | MNESKPGDSQNLACVFCRKHDDCPNKYGEKKTKEKWNLTVHYYC | 64. |
| | ubiquitin protein ligase | | | LLMSSGIWQRGKEEEGVYGFLIEDIRKEVNRASKL | |
| | [Source:HGNC | | | | |
| | Symbol; Acc:HGNC: | | | | |
| | 20338] | | | | |
| G2E3 | G2/M-phase specific E3 | 55632 | 123 | XEVLVVRTLGFIETVYSKWEIKRCQCCGSSGTHLACSSLRSWEQNW | 65. |
| | ubiquitin protein ligase | | | ECLECRGIIYNSGEFQKAKKHVLPNSNNVGITDCLLEESSPKLPRQSP | |
| | [Source:HGNC | | | GSQSKDLLRQGSKFRRNVSTLLIELGFQI | |
| | Symbol; Acc:HGNC: | | | | |
| | 32038] | | | | |
| XK | X-linked Kx blood | 7504 | 445 | MKFPASVLASVFLFVAETTAALSLSSTYRSGGDRMWQALTLLFSLL | 66. |
| | group [Source:HGNC | | | PCALVQLTLLFVHRDLSRDRPLVLLLHLLQLGPLFRCFEVFCIYFQS | |
| | Symbol; Acc:HGNC: | | | GNNEEPYVSITKKRQMPKNGLSEEIEKEVGQAEGKLITHRSAFSRAS | |
| | 12811] | | | VIQAFLGSAPQLTLQLYISVMQQDVTVGRSLLMTISLLSIVYGALRC | |
| | | | | NILAIKIKYDEYEVKVKPLAYVCIFLWRSFEIATRVVVLVLFTSVLK | |
| | | | | TWVVVIILINFFSFFLYPWILFWCSGSPFPENIEKALSRVGTTIVLCFL | |
| | | | | TLLYTGINMFCWSAVQLKIDSPDLISKSHNWYQLLVYYMIRFIENAI | |
| | | | | LLLLWYLFKTDIYMYVCAPLLVLQLLIGYCTAILFMLVFYQFFHPC | |
| | | | | KKLFSSSVSEGFQRWLRCFCWACRQQKPCEPIGKEDLQSSRDRDET | |
| | | | | PSSSKTSPEPGQFLNAEDLCSA* | |
| MYLIP | myosin regulatory light | 29116 | 446 | MLCYVTRPDAVLMEVEVEAKANGEDCLNQVCRRLGIIEVDYFGLQ | 67. |
| | chain interacting | | | FTGSKGESLWLNLRNRISQQMDGLAPYRLKLRVKFFVEPHLILQEQ | |
| | protein [Source:HGNC | | | TRHIFFLHIKEALLAGHLLCSPEQAVELSALLAQTKFGDYNQNTAK | |
| | Symbol; Acc:HGNC: | | | YNYEELCAKELSSATLNSIVAKHKELEGTSQASAEYQVLQIVSAME | |
| | 21155] | | | NYGIEWHSVRDSEGQKLLIGVGPEGISICKDDFSPINRIAYPVVQMA | |
| | | | | TQSGKNVYLTVTKESGNSIVLLFKMISTRAASGLYRAITETHAFYRC | |
| | | | | DTVTSAVMMQYSRDLKGHLASLFLNENINLGKKYVFDIKRTSKEV | |
| | | | | YDHARRALYNAGVVDLVSRNNQSPSHSPLKSSESSMNCSSCEGLSC | |
| | | | | QQTRVLQEKLRKLKEAMLCMVCCEEEINSTFCPCGHTVCCESCAA | |
| | | | | QLQSCPVCRSRVEHVQHVYLPTHTSLLNLTVI* | |
| MYLIP | myosin regulatory light | 29116 | 265 | MENYGIEWHSVRDSEGQKLLIGVGPEGISICKDDFSPINRIAYPVVQ | 68. |
| | chain interacting | | | MATQSGKNVYLTVTKESGNSIVLLFKMISTRAASGLYRAITETHAF | |
| | protein [Source:HGNC | | | YRCDTVTSAVMMQYSRDLKGHLASLFLNENINLGKKYVFDIKRTS | |
| | Symbol; Acc:HGNC: | | | KEVYDHARRALYNAGVVDLVSRNNQSPSHSPLKSSESSMNCSSCE | |
| | 21155] | | | GLSCQQTRVLQEKLRKLKEAMLCMVCCEEEINSTFCPCGHTVCCES | |
| | | | | CAAQLQSCPVCRSRVEHVQHVYLPTHTSLLNLTVI* | |
| EFHC2 | EF-hand domain | 80258 | 750 | MALPLLPGNSFNRNVGKEKFHKSQHWGFCNNVMMLVSDEKPGIG | 69. |
| | containing 2 | | | GEPLLGQKIKPKCSIYPKGDGSDVPSWVAFDKQVLSFDAYLEEEVL | |
| | [Source:HGNC | | | DKSQTNYRIRYYKIYFYPEDDTIQVNEPEVKNSGLLQGTSIRRHRITL | |
| | Symbol; Acc:HGNC: | | | PPPDEDQFYTVYHFNVGTEVVFYGRTFKIYDCDAFTRNFLRKIGVK | |
| | 26233] | | | VNPPVQCPEDPYMKIRREVVEHVEPLRPYESLDTLKQFLQYHGKIL | |
| | | | | CFFCLWDDSVSMFGDRRELILHYFLCDDTIEIKELLPHSSGRDALKM | |
| | | | | FLRRSKLPKNCPPRVYQPGQITDRAVLNSYGDFIKNQADGYLFDRY | |
| | | | | KLGKVDQEFYKDSDLSLGVTINVWGRKVLLYDCDEFTKSYYKSKY | |
| | | | | GIENFTSVSCKPPSPPPKIERKFPPYNGFGSEEDSLRNCIDLKPTPHRR | |
| | | | | NFKKFMEKDSYGSKSNILRFFAKLVTDKCVDLDRMFVISYYLGDDT | |
| | | | | ISVFEPIERNSGIAGGMFLKRSRVKKPGQEVFKSELSEYIKAEELYIG | |
| | | | | VTVNVNGYLFRLLNADEYTLNYMEQNTDKYPFSNLKLALQKLKQE | |
| | | | | EGKSRELKQVFKAADSKHTNMVDYNTFRDILMSLTVGNLAEQEFV | |
| | | | | TIARHYRVPEGTCSDMDFLIALAHEKFKKNMFENFDTFIYSCVYED | |
| | | | | REKKNVLPTKDIKRLCKSSRLPLSDDLLESLLSRFEDSEKQIDYKSFF | |
| | | | | SALNWRKNPVPELQPASYLKERCEDVWLGMPSPIPAKYIDYWTFL | |
| | | | | KDAFGLEEE* | |
| FTSJ1 | FtsJ RNA 2′-O- | 24140 | 328 | MGRTSKDKRDVYYRLAKENGWRARSAFKLLQLDKEFQLFQGVTR | 70. |
| | methyltransferase 1 | | | AVDLCAAPGSWSQVLSQKIGGQGSGHVVAVDLQAMAPLPGVVQI | |
| | [Source:HGNC | | | QGDITQLSTAKEIIQHFKGCPADLVVCDGAPDVTGLHDVDEYMQA | |
| | Symbol; Acc:HGNC: | | | QLLLAALNIATHVLKPGGCFVAKIFRGRDVTLLYSQLQVFFSSVLCA | |
| | 13254] | | | KPRSSRNSSIEAFAVCQGYDPPEGFIPDLSKPLLDHSYDFNQLDGPTR | |
| | | | | IIVPFVTCGDLSSYDSDRSYPLDLEGGSEYKYTPPTQPPISPPYQEAC | |
| | | | | TLKRKGQLAKEIRPQDCPISRVDTFPQPLAAPQCHTLLAPEMEDNE | |
| | | | | MSCSP* | |
| FTSJ1 | FtsJ RNA 2′-O- | 24140 | 330 | MGRTSKDKRDVYYRLAKENGWRARSAFKLLQLDKEFQLFQGVTR | 71. |
| | methyltransferase 1 | | | AVDLCAAPGSWSQVLSQKIGGQGSGHVVAVDLQAMAPLPGVVQI | |
| | [Source:HGNC | | | QGDITQLSTAKEIIQHFKGCPADLVVCDGAPDVTGLHDVDEYMQA | |
| | Symbol; Acc:HGNC: | | | QLLLAALNIATHVLKPGGCFVAKIFRGRDVTLLYSQLQVFFSSVLCA | |
| | 13254] | | | KPRSSRNSSIEAFAVCQGYDPPEGFIPDLSKPLLDHSYDPDFNQLDGP | |
| | | | | TRIIVPFVTCGDLSSYDSDRSYPLDLEGGSEYKYTPPTQPPISPPYQE | |
| | | | | ACTLKRKGQLAKEIRPQDCPISRVDTFPQPLAAPQCHTLLAPEMED | |
| | | | | NEMSCSP* | |
| FTSJ1 | FtsJ RNA 2′-O- | 24140 | 193 | MALNIATHVLKPGGCFVAKIFRGRDVTLLYSQLQVFFSSVLCAKPR | 72. |
| | methyltransferase 1 | | | SSRNSSIEAFAVCQGYDPPEGFIPDLSKPLLDHSYDPDFNQLDGPTRII | |
| | [Source:HGNC | | | VPFVTCGDLSSYDSDRSYPLDLEGGSEYKYTPPTQPPISPPYQEACTL | |
| | Symbol; Acc:HGNC: | | | KRKGQLAKEIRPQDCPISRVDTFPQPLAAPQCHTLLAPEMEDNEMS | |
| | 21354] | | | CSP* | |
| BTN3A2 | butyrophilin subfamily | 11118 | 335 | MKMASSLAFLLLNFHVSLLLVQLLTPCSAQFSVLGPSGPILAMVGE | 73. |
| | 3 member A2 | | | DADLPCHLFPTMSAETMELKWVSSSLRQVVNVYADGKEVEDRQS | |
| | [Source:HGNC | | | APYRGRTSILRDGITAGKAALRIHNVTASDSGKYLCYFQDGDFYEK | |
| | Symbol; Acc:HGNC: | | | ALVELKVAALGSNLHVEVKGYEDGGIHLECRSTGWYPQPQIQWSN | |
| | 1139] | | | AKGENIPAVEAPVVADGVGLYEVAASVIMRGGSGEGVSCIIRNSLL | |
| | | | | GLEKTASISIADPFFRSAQPWIAALAGTLPILLLLLAGASYFLWRQQ | |
| | | | | KEITALSSEIESEQEMKEMGYAATEREISLRESLQEELKRKKIQYLTR | |
| | | | | GEESSSDTNKSA* | |
| BTN3A2 | butyrophilin subfamily | 11118 | 312 | MGIPRAQFSVLGPSGPILAMVGEDADLPCHLFPTMSAETMELKWVS | 74. |
| | 3 member A2 | | | SSLRQVVNVYADGKEVEDRQSAPYRGRTSILRDGITAGKAALRIHN | |
| | [Source:HGNC | | | VTASDSGKYLCYFQDGDFYEKALVELKVAALGSNLHVEVKGYED | |
| | Symbol; Acc:HGNC: | | | GGIHLECRSTGWYPQPQIQWSNAKGENIPAVEAPVVADGVGLYEV | |
| | 1139] | | | AASVIMRGGSGEGVSCIIRNSLLGLEKTASISIADPFFRSAQPWIAAL | |
| | | | | AGTLPILLLLLAGASYFLWRQQKEITALSSEIESEQEMKEMGYAATE | |
| | | | | REISLRESLQEELKRKKIQYLTRGEESSSDTNKSA* | |
| BTN3A2 | butyrophilin subfamily | 11118 | 196 | MVGEDADLPCHLFPTMSAETMELKWVSSSLRQVVNVYADGKEVE | 75. |
| | 3 member A2 | | | DRQSAPYRGRTSILRDGITAGKAALRIHNVTASDSGKYLCYFQDGD | |
| | [Source:HGNC | | | FYEKALVELKVAALGSNLHVEVKGYEDGGIHLECRSTGWYPQPQI | |
| | Symbol; Acc:HGNC: | | | QWSNAKGENIPAVEAPVVADGVGLYEVAASVIMRGGSGEGVSCIIR | |
| | 1139] | | | NSLLGLEKTASISIA | |
| BTN3A2 | butyrophilin subfamily | 11118 | 115 | MVGEDADLPCHLFPTMSAETMELKWVSSSLRQVVNVYADGKEVE | 76. |
| | 3 member A2 | | | DRQSAPYRGRTSILRDGITAGKAALRIHNVTASDSGKYLCYFQDGD | |
| | [Source:HGNC | | | FYEKALVELKVAALGSNLHVEVKGY | |
| | Symbol; Acc:HGNC: | | | | |
| | 1139] | | | | |
| BTN3A2 | butyrophilin subfamily | 11118 | 116 | RGGSGEGVSCIIRNSLLGLEKTASISIADPFFRSAQPWIAALAGTLPIL | 77. |
| | 3 member A2 | | | LLLLAGASYFLWRQQKEITALSSEIESEQEMKEMGYAATEREISLRE | |
| | [Source:HGNC | | | SLQEELKRKKIQYLTREWL* | |
| | Symbol; Acc:HGNC: | | | | |
| | 1139] | | | | |
| BTN3A2 | butyrophilin subfamily | 11118 | 160 | MKMASSLAFLLLNFHVSLLLVQLLTPCSAQFSVLGPSGPILAMVGE | 78. |
| | 3 member A2 | | | DADLPCHLFPTMSAETMELKWVSSSLRQVVNVYADGKEVEDRQS | |
| | [Source:HGNC | | | APYRGRTSILRDGITAGKAALRIHNVTASDSGKYLCYFQDGDFYEK | |
| | Symbol; Acc:HGNC: | | | ALVELKVADPFFRSAQPWIAALAG | |
| | 1139] | | | | |
| BTN3A2 | butyrophilin subfamily | 11118 | 44 | MKMASSLAFLLLNFHVSLLLVQLLTPCSGLCSPLGSLYLAFPV* | 79. |
| | 3 member A2 | | | | |
| | [Source:HGNC | | | | |
| | Symbol; Acc:HGNC: | | | | |
| | 1139] | | | | |
| BTN3A2 | butyrophilin subfamily | 11118 | 293 | MVGEDADLPCHLFPTMSAETMELKWVSSSLRQVVNVYADGKEVE | 80. |
| | 3 member A2 | | | DRQSAPYRGRTSILRDGITAGKAALRIHNVTASDSGKYLCYFQDGD | |
| | [Source:HGNC | | | FYEKALVELKVAALGSNLHVEVKGYEDGGIHLECRSTGWYPQPQI | |
| | Symbol; Acc:HGNC: | | | QWSNAKGENIPAVEAPVVADGVGLYEVAASVIMRGGSGEGVSCIIR | |
| | 1139] | | | NSLLGLEKTASISIADPFFRSAQPWIAALAGTLPILLLLLAGASYFLW | |
| | | | | RQQKEITALSSEIESEQEMKEMGYAATEREISLRESLQEELKRKKIQ | |
| | | | | YLTRGEESSSDTNKSA* | |
| BTN3A1 | butyrophilin subfamily | 11119 | 514 | MKMASFLAFLLLNFRVCLLLLQLLMPHSAQFSVLGPSGPILAMVGE | 81. |
| | 3 member A1 | | | DADLPCHLFPTMSAETMELKWVSSSLRQVVNVYADGKEVEDRQS | |
| | [Source:HGNC | | | APYRGRTSILRDGITAGKAALRIHNVTASDSGKYLCYFQDGDFYEK | |
| | Symbol; Acc:HGNC: | | | ALVELKVAALGSDLHVDVKGYKDGGIHLECRSTGWYPQPQIQWSN | |
| | 1138] | | | NKGENIPTVEAPVVADGVGLYAVAASVIMRGSSGEGVSCTIRSSLL | |
| | | | | GLEKTASISIADPFFRSAQRWIAALAGTLPVLLLLLGGAGYFLWQQ | |
| | | | | QEEKKTQFRKKKREQELREMAWSTMKQEQSTRVKLLEELRWRSIQ | |
| | | | | YASRGERHSAYNEWKKALFKPADVILDPKTANPILLVSEDQRSVQR | |
| | | | | AKEPQDLPDNPERFNWHYCVLGCESFISGRHYWEVEVGDRKEWHI | |
| | | | | GVCSKNVQRKGWVKMTPENGFWTMGLTDGNKYRTLTEPRTNLKL | |
| | | | | PKPPKKVGVFLDYETGDISFYNAVDGSHIHTFLDVSFSEALYPVFRIL | |
| | | | | TLEPTALTICPA* | |
| BTN3A1 | butyrophilin subfamily | 11119 | 43 | MKMASFLAFLLLNFRVCLLLLQLLMPHSAQFSVLGPSGPILAM | 82. |
| | 3 member A1 | | | | |
| | [Source:HGNC | | | | |
| | Symbol; Acc:HGNC: | | | | |
| | 1138] | | | | |
| BTN3A1 | butyrophilin subfamily | 11119 | 353 | MKMASFLAFLLLNFRVCLLLLQLLMPHSAQFSVLGPSGPILAMVGE | 83. |
| | 3 member A1 | | | DADLPCHLFPTMSAETMELKWVSSSLRQVVNVYADGKEVEDRQS | |
| | [Source:HGNC | | | APYRGRTSILRDGITAGKAALRIHNVTASDSGKYLCYFQDGDFYEK | |
| | Symbol; Acc:HGNC: | | | ALVELKVAALGSDLHVDVKGYKDGGIHLECRSTGWYPQPQIQWSN | |
| | 1138] | | | NKGENIPTVEAPVVADGVGLYAVAASVIMRGSSGEGVSCTIRSSLL | |
| | | | | GLEKTASISIADPFFRSAQRWIAALAGTLPVLLLLLGGAGYFLWQQ | |
| | | | | QEEKKTQFRKKKREQELREMAWSTMKQEQSTRVKLLEELRWRSIQ | |
| | | | | YASRGERHSAYNEWKKALFKPGEEMLQMRLHFVK* | |
| BTN3A1 | butyrophilin subfamily | 11119 | 119 | MKMASFLAFLLLNFRVCLLLLQLLMPHSAQFSVLGPSGPILAMVGE | 84. |
| | 3 member A1 | | | DADLPCHLFPTMSAETMELKWVSSSLRQVVNVYADGKEVEDRQS | |
| | [Source:HGNC | | | APYRGRTSILRDGITAGKAALRIHNVTAS | |
| | Symbol; Acc:HGNC: | | | | |
| | 1138] | | | | |
| BTN3A1 | butyrophilin subfamily | 11119 | 462 | MKMASFLAFLLLNFRVCLLLLQLLMPHSAQFSVLGPSGPILAMVGE | 85. |
| | 3 member A1 | | | DADLPCHLFPTMSAETMELKWVSSSLRQVVNVYADGKEVEDRQS | |
| | [Source:HGNC | | | APYRGRTSILRDGITAGKAALRIHNVTASDSGKYLCYFQDGDFYEK | |
| | Symbol; Acc:HGNC: | | | ALVELKVADGVGLYAVAASVIMRGSSGEGVSCTIRSSLLGLEKTASI | |
| | 1138] | | | SIADPFFRSAQRWIAALAGTLPVLLLLLGGAGYFLWQQQEEKKTQF | |
| | | | | RKKKREQELREMAWSTMKQEQSTRVKLLEELRWRSIQYASRGERH | |
| | | | | SAYNEWKKALFKPADVILDPKTANPILLVSEDQRSVQRAKEPQDLP | |
| | | | | DNPERFNWHYCVLGCESFISGRHYWEVEVGDRKEWHIGVCSKNVQ | |
| | | | | RKGWVKMTPENGFWTMGLTDGNKYRTLTEPRTNLKLPKPPKKVG | |
| | | | | VFLDYETGDISFYNAVDGSHIHTFLDVSFSEALYPVFRILTLEPTALTI | |
| | | | | CPA* | |
| BTN3A1 | butyrophilin subfamily | 11119 | 379 | MKMASFLAFLLLNFRVCLLLLQLLMPHSAQFSVLGPSGPILAMVGE | 86. |
| | 3 member A1 | | | DADLPCHLFPTMSAETMELKWVSSSLRQVVNVYADGKEVEDRQS | |
| | [Source:HGNC | | | APYRGRTSILRDGITAGKAALRIHNVTASDSGKYLCYFQDGDFYEK | |
| | Symbol; Acc:HGNC: | | | ALVELKVAALGSDLHVDVKGYKDGGIHLECRSTGWYPQPQIQWSN | |
| | 1138] | | | NKGENIPTVEAPVVADGVGLYAVAASVIMRGSSGEGVSCTIRSSLL | |
| | | | | GLEKTASISIADPFFRSAQRWIAALAGTLPVLLLLLGGAGYFLWQQ | |
| | | | | QEEKKTQFRKKKREQELREMAWSTMKQEQSTRVKLLEELRWRSIQ | |
| | | | | YASRGERHSAYNEWKKALFKPGPPIGQTQQQTRGQGSPVALSQES | |
| | | | | AQRTDSWGPEEGGES* | |
| BTN3A1 | butyrophilin subfamily | 11119 | 92 | MKMASFLAFLLLNFRVCLLLLQLLMPHSAQFSVLGPSGPILAMVGE | 87. |
| | 3 member A1 | | | DADLPCHLFPTMSAETMELKWVSSSLRQVVNVYADGKEVEDRQS | |
| | [Source:HGNC | | | AP | |
| | Symbol; Acc:HGNC: | | | | |
| | 1138] | | | | |
| BTN2A1 | butyrophilin subfamily | 11120 | 528 | MESAAALHFSRPASLLLLLLSLCALVSAQFIVVGPTDPILATVGENT | 88. |
| | 2 member A1 | | | TLRCHLSPEKNAEDMEVRWFRSQFSPAVFVYKGGRERTEEQMEEY | |
| | [Source:HGNC | | | RGRTTFVSKDISRGSVALVIHNITAQENGTYRCYFQEGRSYDEAILH | |
| | Symbol; Acc:HGNC: | | | LVVAGLGSKPLISMRGHEDGGIRLECISRGWYPKPLTVWRDPYGGV | |
| | 1136] | | | APALKEVSMPDADGLFMVTTAVIIRDKSVRNMSCSINNTLLGQKKE | |
| | | | | SVIFIPESFMPSVSPCAVALPIIVVILMIPIAVCIYWINKLQKEKKILSG | |
| | | | | EKEFERETREIALKELEKERVQKEEELQVKEKLQEELRWRRTFLHA | |
| | | | | VDVVLDPDTAHPDLFLSEDRRSVRRCPFRHLGESVPDNPERFDSQP | |
| | | | | CVLGRESFASGKHYWEVEVENVIEWTVGVCRDSVERKGEVLLIPQ | |
| | | | | NGFWTLEMHKGQYRAVSSPDRILPLKESLCRVGVFLDYEAGDVSF | |
| | | | | YNMRDRSHIYTCPRSAFSVPVRPFFRLGCEDSPIFICPALTGANGVTV | |
| | | | | PEEGLTLHRVGTHQSL* | |
| BTN2A1 | butyrophilin subfamily | 11120 | 152 | MESAAALHFSRPASLLLLLLSLCALVSAQFIVVGPTDPILATVGENT | 89. |
| | 2 member A1 | | | TLRCHLSPEKNAEDMEVRWFRSQFSPAVFVYKGGRERTEEQMEEY | |
| | [Source:HGNC | | | RGRTTFVSKDISRGSVALVIHNITAQENGTYRCYFQEGRSYDEAILH | |
| | Symbol; Acc:HGNC: | | | LVVAELLEAEVY* | |
| | 1136] | | | | |
| BTN2A1 | butyrophilin subfamily | 11120 | 331 | MESAAALHFSRPASLLLLLLSLCALVSAQFIVVGPTDPILATVGENT | 90. |
| | 2 member A1 | | | TLRCHLSPEKNAEDMEVRWFRSQFSPAVFVYKGGRERTEEQMEEY | |
| | [Source:HGNC | | | RGRTTFVSKDISRGSVALVIHNITAQENGTYRCYFQEGRSYDEAILH | |
| | Symbol; Acc:HGNC: | | | LVVAGLGSKPLISMRGHEDGGIRLECISRGWYPKPLTVWRDPYGGV | |
| | 1136] | | | APALKEVSMPDADGLFMVTTAVIIRDKSVRNMSCSINNTLLGQKKE | |
| | | | | SVIFIPESFMPSVSPCAVALPIIVVILMIPIAVCIYWINKLQKEKKILSG | |
| | | | | EKEFERETREIALKELEKERVQKEEELQVKEKLQEELRWRRTFLHA | |
| | | | | GPV* | |
| BTN2A1 | butyrophilin subfamily | 11120 | 79 | XIIVVILMIPIAVCIYWINKLQKEKKILSGEKEFERETREIALKELEKE | 91. |
| | 2 member A1 | | | RVQKEEELQVKEKLQEELRWRRTFLHAGW* | |
| | [Source:HGNC | | | | |
| | Symbol; Acc:HGNC: | | | | |
| | 1136] | | | | |
| BTN2A1 | butyrophilin subfamily | 11120 | 86 | MEVRWFRSQFSPAVFVYKGGRERTEEQMEEYRGRTTFVSKDISRGS | 92. |
| | 2 member A1 | | | VALVIHNITAQENGTYRCYFQEGRSYDEAILHLVVAGLGS | |
| | [Source:HGNC | | | | |
| | Symbol; Acc:HGNC: | | | | |
| | 1136] | | | | |
| BTN2A1 | butyrophilin subfamily | 11120 | 335 | MESAAALHFSRPASLLLLLLSLCALVSAQFIVVGPTDPILATVGENT | 93. |
| | 2 member A1 | | | TLRCHLSPEKNAEDMEVRWFRSQFSPAVFVYKGGRERTEEQMEEY | |
| | [Source:HGNC | | | RGRTTFVSKDISRGSVALVIHNITAQENGTYRCYFQEGRSYDEAILH | |
| | Symbol; Acc:HGNC: | | | LVVAGLGSKPLISMRGHEDGGIRLECISRGWYPKPLTVWRDPYGGV | |
| | 1136] | | | APALKEVSMPDADGLFMVTTAVIIRDKSVRNMSCSINNTLLGQKKE | |
| | | | | SVIFIPESFMPSVSPCAVALPIIVVILMIPIAVCIYWINKLQKEKKILSG | |
| | | | | EKEFERETREIALKELEKERVQKEEELQVKEKLQEELRWRRTFLHA | |
| | | | | ELQFFSN* | |
| BTN2A1 | butyrophilin subfamily | 11120 | 467 | MEVRWFRSQFSPAVFVYKGGRERTEEQMEEYRGRTTFVSKDISRGS | 94. |
| | 2 member A1 | | | VALVIHNITAQENGTYRCYFQEGRSYDEAILHLVVAGLGSKPLISMR | |
| | [Source:HGNC | | | GHEDGGIRLECISRGWYPKPLTVWRDPYGGVAPALKEVSMPDADG | |
| | Symbol; Acc:HGNC: | | | LFMVTTAVIIRDKSVRNMSCSINNTLLGQKKESVIFIPESFMPSVSPC | |
| | 1136] | | | AVALPIIVVILMIPIAVCIYWINKLQKEKKILSGEKEFERETREIALKE | |
| | | | | LEKERVQKEEELQVKEKLQEELRWRRTFLHAVDVVLDPDTAHPDL | |
| | | | | FLSEDRRSVRRCPFRHLGESVPDNPERFDSQPCVLGRESFASGKHY | |
| | | | | WEVEVENVIEWTVGVCRDSVERKGEVLLIPQNGFWTLEMHKGQY | |
| | | | | RAVSSPDRILPLKESLCRVGVFLDYEAGDVSFYNMRDRSHIYTCPRS | |
| | | | | AFSVPVRPFFRLGCEDSPIFICPALTGANGVTVPEEGLTLHRVGTHQS | |
| | | | | L* | |
| SGMS1 | sphingomyelin synthase | 259230 | 242 | MKEVVYWSPKKVADWLLENAMPEYCEPLEHFTGQDLINLTQEDFK | 95. |
| | 1 [Somce:HGNC | | | KPPLCRVSSDNGQRLLDMIETLKMEHHLEAHKNGHANGHLNIGVD | |
| | Symbol; Acc:HGNC: | | | IPTPDGSFSIKIKPNGMPNGYRKEMIKIPMPELERSQYPMEWGKTFL | |
| | 29799] | | | AFLYALSCFVLTTVMISVVHERVPPKEVQPPLPDTFFDHFNRVQWA | |
| | | | | FSICEINGMILVGLWLIQWLLLKYKDVGNESRVVMIFLSIVHPVLLL | |
| | | | | GSIAGFLSLSL* | |
| SGMS1 | sphingomyelin synthase | 259230 | 414 | MKEVVYWSPKKVADWLLENAMPEYCEPLEHFTGQDLINLTQEDFK | 96. |
| | 1 [Source:HGNC | | | KPPLCRVSSDNGQRLLDMIETLKMEHHLEAHKNGHANGHLNIGVD | |
| | Symbol; Ace:HGNC: | | | IPTPDGSFSIKIKPNGMPNGYRKEMIKIPMPELERSQYPMEWGKTFL | |
| | 29799] | | | AFLYALSCFVLTTVMISVVHERVPPKEVQPPLPDTFFDHFNRVQWA | |
| | | | | FSICEINGMILVGLWLIQWLLLKYKSIISRRFFCIVGTLYLYRCITMY | |
| | | | | VTTLPVPGMHFNCSPKLFGDWEAQLRRIMKLIAGGGLSITGSHNMC | |
| | | | | GDYLYSGHTVMLTLTYLFIKEYSPRRLWWYHWICWLLSVVGIFCIL | |
| | | | | LAHDHYTVDVVVAYYITTRLFWWYHTMANQQVLKEASQMNLLA | |
| | | | | RVWWYRPFQYFEKNVQGIVPRSYHWPFPWPVVHLSRQVKYSRLV | |
| | | | | NDT* | |
| SGMS1 | sphingomyelin synthase | 259230 | 220 | MKEVVYWSPKKVADWLLENAMPEYCEPLEHFTGQDLINLTQEDFK | 97. |
| | 1 [Source:HGNC | | | KPPLCRVSSDNGQRLLDMIETLKMEHHLEAHKNGHANGHLNIGVD | |
| | Symbol; Ace:HGNC: | | | IPTPDGSFSIKIKPNGMPNGYRKEMIKIPMPELERSQYPMEWGKTFL | |
| | 29799] | | | AFLYALSCFVLTTVMISVVHERVPPKEVQPPLPDTFFDHFNRVQWA | |
| | | | | FSICEINGMILVGLWLIQWLLLKYNFSETGKPNCEE* | |
| SGMS1 | sphingomyelin synthase | 259230 | 13 | LWLIQWLLLKYK* | 98. |
| | 1 [Source:HGNC | | | | |
| | Symbol; Ace:HGNC: | | | | |
| | 29799] | | | | |
| SGMS1 | sphingomyelin synthase | 259230 | 36 | MYVTTLPVPGMHFNCSPKLFGDWEAQLRRIMKLIAG | 99. |
| | 1 [Source:HGNC | | | | |
| | Symbol; Ace:HGNC: | | | | |
| | 29799] | | | | |
| GSPT2 | G1 to S phase transition | 23708 | 629 | MDSGSSSSDSAPDCWDQVDMESPGSAPSGDGVSSAVAEAQREPLSS | 100. |
| | 2 [Somce:HGNC | | | AFSRKLNVNAKPFVPNVHAAEFVPSFLRGPTQPPTLPAGSGSNDETC | |
| | Symbol; Acc:HGNC: | | | TGAGYPQGKRMGRGAPVEPSREEPLVSLEGSNSAVTMELSEPVVEN | |
| | 4622] | | | GEVEMALEESWEHSKEVSEAEPGGGSSGDSGPPEESGQEMMEEKE | |
| | | | | EIRKSKSVIVPSGAPKKEHVNVVFIGHVDAGKSTIGGQIMFLTGMVD | |
| | | | | KRTLEKYEREAKEKNRETWYLSWALDTNQEERDKGKTVEVGRAY | |
| | | | | FETERKHFTILDAPGHKSFVPNMIGGASQADLAVLVISARKGEFETG | |
| | | | | FEKGGQTREHAMLAKTAGVKHLIVLINKMDDPTVNWSIERYEECK | |
| | | | | EKLVPFLKKVGFSPKKDIHFMPCSGLTGANIKEQSDFCPWYTGLPFI | |
| | | | | PYLDNLPNFNRSIDGPIRLPIVDKYKDMGTVVLGKLESGSIFKGQQL | |
| | | | | VMMPNKHNVEVLGILSDDTETDFVAPGENLKIRLKGIEEEEILPGFIL | |
| | | | | CDPSNLCHSGRTFDVQIVIIEHKSIICPGYNAVLHIHTCIEEVEITALIS | |
| | | | | LVDKKSGEKSKTRPRFVKQDQVCIARLRTAGTICLETFKDFPQMGR | |
| | | | | FTLRDEGKTIAIGKVLKLVPEKD* | |
| CREBBP | CREB binding protein | 1387 | 2443 | MAENLLDGPPNPKRAKLSSPGFSANDSTDFGSLFDLENDLPDELIPN | 101. |
| | [Source:HGNC | | | GGELGLLNSGNLVPDAASKHKQLSELLRGGSGSSINPGIGNVSASSP | |
| | Symbol; Acc:HGNC: | | | VQQGLGGQAQGQPNSANMASLSAMGKSPLSQGDSSAPSLPKQAAS | |
| | 2348] | | | TSGPTPAASQALNPQAQKQVGLATSSPATSQTGPGICMNANFNQTH | |
| | | | | PGLLNSNSGHSLINQASQGQAQVMNGSLGAAGRGRGAGMPYPTPA | |
| | | | | MQGASSSVLAETLTQVSPQMTGHAGLNTAQAGGMAKMGITGNTS | |
| | | | | PFGQPFSQAGGQPMGATGVNPQLASKQSMVNSLPTFPTDIKNTSVT | |
| | | | | NVPNMSQMQTSVGIVPTQAIATGPTADPEKRKLIQQQLVLLLHAHK | |
| | | | | CQRREQANGEVRACSLPHCRTMKNVLNHMTHCQAGKACQVAHC | |
| | | | | ASSRQIISHWKNCTRHDCPVCLPLKNASDKRNQQTILGSPASGIQNT | |
| | | | | IGSVGTGQQNATSLSNPNPIDPSSMQRAYAALGLPYMNQPQTQLQP | |
| | | | | QVPGQQPAQPQTHQQMRTLNPLGNNPMNIPAGGITTDQQPPNLISE | |
| | | | | SALPTSLGATNPLMNDGSNSGNIGTLSTIPTAAPPSSTGVRKGWHEH | |
| | | | | VTQDLRSHLVHKLVQAIFPTPDPAALKDRRMENLVAYAKKVEGD | |
| | | | | MYESANSRDEYYHLLAEKIYKIQKELEEKRRSRLHKQGILGNQPAL | |
| | | | | PAPGAQPPVIPQAQPVRPPNGPLSLPVNRMQVSQGMNSFNPMSLGN | |
| | | | | VQLPQAPMGPRAASPMNHSVQMNSMGSVPGMAISPSRMPQPPNM | |
| | | | | MGAHTNNMMAQAPAQSQFLPQNQFPSSSGAMSVGMGQPPAQTGV | |
| | | | | SQGQVPGAALPNPLNMLGPQASQLPCPPVTQSPLHPTPPPASTAAG | |
| | | | | MPSLQHTTPPGMTPPQPAAPTQPSTPVSSSGQTPTPTPGSVPSATQT | |
| | | | | QSTPTVQAAAQAQVTPQPQTPVQPPSVATPQSSQQQPTPVHAQPPG | |
| | | | | TPLSQAAASIDNRVPTPSSVASAETNSQQPGPDVPVLEMKTETQAE | |
| | | | | DTEPDPGESKGEPRSEMMEEDLQGASQVKEETDIAEQKSEPMEVDE | |
| | | | | KKPEVKVEVKEEEESSSNGTASQSTSPSQPRKKIFKPEELRQALMPT | |
| | | | | LEALYRQDPESLPFRQPVDPQLLGIPDYFDIVKNPMDLSTIKRKLDT | |
| | | | | GQYQEPWQYVDDVWLMFNNAWLYNRKTSRVYKFCSKLAEVFEQ | |
| | | | | EIDPVMQSLGYCCGRKYEFSPQTLCCYGKQLCTIPRDAAYYSYQNR | |
| | | | | YHFCEKCFTEIQGENVTLGDDPSQPQTTISKDQFEKKKNDTLDPEPF | |
| | | | | VDCKECGRKMHQICVLHYDIIWPSGFVCDNCLKKTGRPRKENKFS | |
| | | | | AKRLQTTRLGNHLEDRVNKFLRRQNHPEAGEVFVRVVASSDKTVE | |
| | | | | VKPGMKSRFVDSGEMSESFPYRTKALFAFEEIDGVDVCFFGMHVQE | |
| | | | | YGSDCPPPNTRRVYISYLDSIHFFRPRCLRTAVYHEILIGYLEYVKKL | |
| | | | | GYVTGHIWACPPSEGDDYIFHCHPPDQKIPKPKRLQEWYKKMLDK | |
| | | | | AFAERIIHDYKDIFKQATEDRLTSAKELPYFEGDFWPNVLEESIKELE | |
| | | | | QEEEERKKEESTAASETTEGSQGDSKNAKKKNNKKTNKNKSSISRA | |
| | | | | NKKKPSMPNVSNDLSQKLYATMEKHKEVFFVIHLHAGPVINTLPPI | |
| | | | | VDPDPLLSCDLMDGRDAFLTLARDKHWEFSSLRRSKWSTLCMLVE | |
| | | | | LHTQGQDRFVYTCNECKHHVETRWHCTVCEDYDLCINCYNTKSH | |
| | | | | AHKMVKWGLGLDDEGSSQGEPQSKSPQESRRLSIQRCIQSLVHACQ | |
| | | | | CRNANCSLPSCQKMKRVVQHTKGCKRKTNGGCPVCKQLIALCCY | |
| | | | | HAKHCQENKCPVPFCLNIKHKLRQQQIQHRLQQAQLMRRRMATM | |
| | | | | NTRNVPQQSLPSPTSAPPGTPTQQPSTPQTPQPPAQPQPSPVSMSPAG | |
| | | | | FPSVARTQPPTTVSTGKPTSQVPAPPPPAQPPPAAVEAARQIEREAQ | |
| | | | | QQQHLYRVNINNSMPPGRTGMGTPGSQMAPVSLNVPRPNQVSGPV | |
| | | | | MPSMPPGQWQQAPLPQQQPMPGLPRPVISMQAQAAVAGPRMPSV | |
| | | | | QPPRSISPSALQDLLRTLKSPSSPQQQQQVLNILKSNPQLMAAFIKQR | |
| | | | | TAKYVANQPGMQPQPGLQSQPGMQPQPGMHQQPSLQNLNAMQA | |
| | | | | GVPRPGVPPQQQAMGGLNPQGQALNIMNPGHNPNMASMNPQYRE | |
| | | | | MLRRQLLQQQQQQQQQQQQQQQQQQGSAGMAGGMAGHGQFQQ | |
| | | | | PQGPGGYPPAMQQQQRMQQHLPLQGSSMGQMAAQMGQLGQMG | |
| | | | | QPGLGADSTPNIQQALQQRILQQQQMKQQIGSPGQPNPMSPQQHM | |
| | | | | LSGQPQASHLPGQQIATSLSNQVRSPAPVQSPRPQSQPPHSSPSPRIQ | |
| | | | | PQPSPHHVSPQTGSPHPGLAVTMASSIDQGHLGNPEQSAMLPQLNT | |
| | | | | PSRSALSSELSLVGDTTGDTLEKFVEGL* | |
| CREBBP | CREB binding protein | 1387 | 2405 | MAENLLDGPPNPKRAKLSSPGFSANDSTDFGSLFDLENDLPDELIPN | 102. |
| | [Source:HGNC | | | GGELGLLNSGNLVPDAASKHKQLSELLRGGSGSSINPGIGNVSASSP | |
| | Symbol; Acc:HGNC: | | | VQQGLGGQAQGQPNSANMASLSAMGKSPLSQGDSSAPSLPKQAAS | |
| | 2348] | | | TSGPTPAASQALNPQAQKQVGLATSSPATSQTGPGICMNANFNQTH | |
| | | | | PGLLNSNSGHSLINQASQGQAQVMNGSLGAAGRGRGAGMPYPTPA | |
| | | | | MQGASSSVLAETLTQVSPQMTGHAGLNTAQAGGMAKMGITGNTS | |
| | | | | PFGQPFSQAGGQPMGATGVNPQLASKQSMVNSLPTFPTDIKNTSVT | |
| | | | | NVPNMSQMQTSVGIVPTQAIATGPTADPEKRKLIQQQLVLLLHAHK | |
| | | | | CQRREQANGEVRACSLPHCRTMKNVLNHMTHCQAGKACQAILGS | |
| | | | | PASGIQNTIGSVGTGQQNATSLSNPNPIDPSSMQRAYAALGLPYMN | |
| | | | | QPQTQLQPQVPGQQPAQPQTHQQMRTLNPLGNNPMNIPAGGITTD | |
| | | | | QQPPNLISESALPTSLGATNPLMNDGSNSGNIGTLSTIPTAAPPSSTG | |
| | | | | VRKGWHEHVTQDLRSHLVHKLVQAIFPTPDPAALKDRRMENLVA | |
| | | | | YAKKVEGDMYESANSRDEYYHLLAEKIYKIQKELEEKRRSRLHKQ | |
| | | | | GILGNQPALPAPGAQPPVIPQAQPVRPPNGPLSLPVNRMQVSQGMN | |
| | | | | SFNPMSLGNVQLPQAPMGPRAASPMNHSVQMNSMGSVPGMAISPS | |
| | | | | RMPQPPNMMGAHTNNMMAQAPAQSQFLPQNQFPSSSGAMSVGM | |
| | | | | GQPPAQTGVSQGQVPGAALPNPLNMLGPQASQLPCPPVTQSPLHPT | |
| | | | | PPPASTAAGMPSLQHTTPPGMTPPQPAAPTQPSTPVSSSGQTPTPTPG | |
| | | | | SVPSATQTQSTPTVQAAAQAQVTPQPQTPVQPPSVATPQSSQQQPTP | |
| | | | | VHAQPPGTPLSQAAASIDNRVPTPSSVASAETNSQQPGPDVPVLEM | |
| | | | | KTETQAEDTEPDPGESKGEPRSEMMEEDLQGASQVKEETDIAEQKS | |
| | | | | EPMEVDEKKPEVKVEVKEEEESSSNGTASQSTSPSQPRKKIFKPEEL | |
| | | | | RQALMPTLEALYRQDPESLPFRQPVDPQLLGIPDYFDIVKNPMDLST | |
| | | | | IKRKLDTGQYQEPWQYVDDVWLMFNNAWLYNRKTSRVYKFCSKL | |
| | | | | AEVFEQEIDPVMQSLGYCCGRKYEFSPQTLCCYGKQLCTIPRDAAY | |
| | | | | YSYQNRYHFCEKCFTEIQGENVTLGDDPSQPQTTISKDQFEKKKND | |
| | | | | TLDPEPFVDCKECGRKMHQICVLHYDIIWPSGFVCDNCLKKTGRPR | |
| | | | | KENKFSAKRLQTTRLGNHLEDRVNKFLRRQNHPEAGEVFVRVVAS | |
| | | | | SDKTVEVKPGMKSRFVDSGEMSESFPYRTKALFAFEEIDGVDVCFF | |
| | | | | GMHVQEYGSDCPPPNTRRVYISYLDSIHFFRPRCLRTAVYHEILIGY | |
| | | | | LEYVKKLGYVTGHIWACPPSEGDDYIFHCHPPDQKIPKPKRLQEWY | |
| | | | | KKMLDKAFAERIIHDYKDIFKQATEDRLTSAKELPYFEGDFWPNVL | |
| | | | | EESIKELEQEEEERKKEESTAASETTEGSQGDSKNAKKKNNKKTNK | |
| | | | | NKSSISRANKKKPSMPNVSNDLSQKLYATMEKHKEVFFVIHLHAGP | |
| | | | | VINTLPPIVDPDPLLSCDLMDGRDAFLTLARDKHWEFSSLRRSKWS | |
| | | | | TLCMLVELHTQGQDRFVYTCNECKHHVETRWHCTVCEDYDLCINC | |
| | | | | YNTKSHAHKMVKWGLGLDDEGSSQGEPQSKSPQESRRLSIQRCIQS | |
| | | | | LVHACQCRNANCSLPSCQKMKRVVQHTKGCKRKTNGGCPVCKQL | |
| | | | | IALCCYHAKHCQENKCPVPFCLNIKHKLRQQQIQHRLQQAQLMRR | |
| | | | | RMATMNTRNVPQQSLPSPTSAPPGTPTQQPSTPQTPQPPAQPQPSPV | |
| | | | | SMSPAGFPSVARTQPPTTVSTGKPTSQVPAPPPPAQPPPAAVEAARQ | |
| | | | | IEREAQQQQHLYRVNINNSMPPGRTGMGTPGSQMAPVSLNVPRPN | |
| | | | | QVSGPVMPSMPPGQWQQAPLPQQQPMPGLPRPVISMQAQAAVAGP | |
| | | | | RMPSVQPPRSISPSALQDLLRTLKSPSSPQQQQQVLNILKSNPQLMA | |
| | | | | AFIKQRTAKYVANQPGMQPQPGLQSQPGMQPQPGMHQQPSLQNL | |
| | | | | NAMQAGVPRPGVPPQQQAMGGLNPQGQALNIMNPGHNPNMASM | |
| | | | | NPQYREMLRRQLLQQQQQQQQQQQQQQQQQQGSAGMAGGMAG | |
| | | | | HGQFQQPQGPGGYPPAMQQQQRMQQHLPLQGSSMGQMAAQMGQ | |
| | | | | LGQMGQPGLGADSTPNIQQALQQRILQQQQMKQQIGSPGQPNPMS | |
| | | | | PQQHMLSGQPQASHLPGQQIATSLSNQVRSPAPVQSPRPQSQPPHSS | |
| | | | | PSPRIQPQPSPHHVSPQTGSPHPGLAVTMASSIDQGHLGNPEQSAML | |
| | | | | PQLNTPSRSALSSELSLVGDTTGDTLEKFVEGL* | |
| CREBBP | CREB binding protein | 1387 | 255 | XDGSNSGNIGTLSTIPTAAPPSSTGVRKGWHEHVTQDLRSHLVHKL | 103. |
| | [Source:HGNC | | | VQAIFPTPDPAALKDRRMENLVAYAKKVEGDMYESANSRDEYYHL | |
| | Symbol; Acc:HGNC: | | | LAEKIYKIQKELEEKRRSRLHKQGILGNQPALPAPGAQPPVIPQAQP | |
| | 2348] | | | VRPPRMNSFNPMSLGNVQLPQAPMGPRAASPMNHSVQMNSMGSV | |
| | | | | PGMAISPSRMPQPPNMMGAHTNNMMAQAPAQSQFLPQNQFPSSSG | |
| | | | | AMSVGMGQPPAQTGVSQVLCPTGTVAP* | |
| CREBBP | CREB binding protein | 1387 | 1105 | NATSLSNPNPIDPSSMQRAYAALGLPYMNQPQTQLQPQVPGQQPA | 104. |
| | [Source:HGNC | | | QPQTHQQMRTLNPLGNNPMNIPAGGITTDQQPPNLISESALPTSLGA | |
| | Symbol; Acc:HGNC: | | | TNPLMNDGSNSGNIGTLSTIPTAAPPSSTGVRKGWHEHVTQDLRSH | |
| | 2348] | | | LVHKLVQAIFPTPDPAALKDRRMENLVAYAKKVEGDMYESANSRD | |
| | | | | EYYHLLAEKIYKIQKELEEKRRSRLHKQGILGNQPALPAPGAQPPVI | |
| | | | | PQAQPVRPPNGPLSLPVNRMQVSQGMNSFNPMSLGNVQLPQAPMG | |
| | | | | PRAASPMNHSVQMNSMGSVPGMAISPSRMPQPPNMMGAHTNNM | |
| | | | | MAQAPAQSQFLPQNQFPSSSGAMSVGMGQPPAQTGVSQGQVPGA | |
| | | | | ALPNPLNMLGPQASQLPCPPVTQSPLHPTPPPASTAAGMPSLQHTTP | |
| | | | | PGMTPPQPAAPTQPSTPVSSSGQTPTPTPGSVPSATQTQSTPTVQAA | |
| | | | | AQAQVTPQPQTPVQPPSVATPQSSQQQPTPVHAQPPGTPLSQAAASI | |
| | | | | DNRVPTPSSVASAETNSQQPGPDVPVLEMKTETQAEDTEPDPGESK | |
| | | | | GEPRSEMMEEDLQGASQVKEETDIAEQKSEPMEVDEKKPEVKVEV | |
| | | | | KEEEESSSNGTASQSTSPSQPRKKIFKPEELRQALMPTLEALYRQDP | |
| | | | | ESLPFRQPVDPQLLGIPDYFDIVKNPMDLSTIKRKLDTGQYQEPWQY | |
| | | | | VDDVWLMFNNAWLYNRKTSRVYKFCSKLAEVFEQEIDPVMQSLG | |
| | | | | YCCGRKYEFSPQTLCCYGKQLCTIPRDAAYYSYQNSSPKYGLLADR | |
| | | | | YHFCEKCFTEIQGENVTLGDDPSQPQTTISKDQFEKKKNDTLDPEPF | |
| | | | | VDCKECGRKMHQICVLHYDIIWPSGFVCDNCLKKTGRPRKENKFS | |
| | | | | AKRLQTTRLGNHLEDRVNKFLRRQNHPEAGEVFVRVVASSDKTVE | |
| | | | | VKPGMKSRFVDSGEMSESFPYRTKALFAFEEIDGVDVCFFGMHVQE | |
| | | | | YGSDCPPPNTRRVYISYLDSIHFFRPRCLRTAVYHEILIGYLEYVKKL | |
| | | | | GYVTGHIWACPPSEGDDYIFHCHPPDQKIPKPKRLQEWYKKMLDK | |
| | | | | AFAERIIHDYKDIFKQATEDRLTSAKELPYFEGDFWPNVLEESIKELE | |
| | | | | QEE | |
| CREBBP | CREB binding protein | 1387 | 33 | XTCNECKHHVETRWHCTVCEFLNAAVFISFCEH | 105. |
| | [Source:HGNC | | | | |
| | Symbol; Acc:HGNC: | | | | |
| | 2348] | | | | |
| CREBBP | CREB binding protein | 1387 | 197 | XRYHFCEKCFTEIQGENVTLGDDPSQPQTTISKDQFEKKKNDTLDPE | 106. |
| | [Source:HGNC | | | PFVDCKECGRKMHQICVLHYDIIWPSGFVCDNCLKKTGRPRKENKF | |
| | Symbol; Acc:HGNC: | | | SAKRLQTTRLGNHLEDRVNKFLRRQNHPEAGEVFVRVVASSDKTV | |
| | 2348] | | | EVKPGMKSRFVDSGEMSESFPYRTKALFAFEEIDGVDVCFFGMHVQ | |
| | | | | EYGSDCPPPNTR* | |
| CREBBP | CREB binding protein | 1387 | 182 | XHLLAEKIYKIQKELEEKRRSRLHKQGILGNQPALPAPGAQPPVIPQ | 107. |
| | [Source:HGNC | | | AQPVRPPNGPLSLPVNRMQVSQGMNSFNPMSLGNVQLPQAPMGPR | |
| | Symbol; Acc:HGNC: | | | AASPMNHSVQMNSMGSVPGMAISPSRMPQPPNMMGAHTNNMMA | |
| | 2348] | | | QAPAQSQFLPQNQFPSSSGAMSVGMGQPPAQTGVSQVLCPTGTVA | |
| | | | | P* | |
| TSPYL2 | TSPY like 2 | 64061 | 694 | MDRPDEGPPAKTRRLSSSESPQRDPPPPPPPPPLLRLPLPPPQQRPRL | 108. |
| | [Source:HGNC | | | QEETEAAQVLADMRGVGLGPALPPPPPYVILEEGGIRAYFTLGAECP | |
| | Symbol; Acc:HGNC: | | | GWDSTIESGYGEAPPPTESLEALPTPEASGGSLEIDFQVVQSSSFGGE | |
| | 24358] | | | GALETCSAVGWAPQRLVDPKSKEEAIIIVEDEDEDERESMRSSRRRR | |
| | | | | RRRRRKQRKVKRESRERNAERMESILQALEDIQLDLEAVNIKAGKA | |
| | | | | FLRLKRKFIQMRRPFLERRDLIIQHIPGFWVKAFLNHPRISILINRRDE | |
| | | | | DIFRYLTNLQVQDLRHISMGYKMKLYFQTNPYFTNMVIVKEFQRN | |
| | | | | RSGRLVSHSTPIRWHRGQEPQARRHGNQDASHSFFSWFSNHSLPEA | |
| | | | | DRIAEIIKNDLWVNPLRYYLRERGSRIKRKKQEMKKRKTRGRCEVV | |
| | | | | IMEDAPDYYAVEDIFSEISDIDETIHDIKISDFMETTDYFETTDNEITDI | |
| | | | | NENICDSENPDHNEVPNNETTDNNESADDHETTDNNESADDNNEN | |
| | | | | PEDNNKNTDDNEENPNNNENTYGNNFFKGGFWGSHGNNQDSSDS | |
| | | | | DNEADEASDDEDNDGNEGDNEGSDDDGNEGDNEGSDDDDRDIEY | |
| | | | | YEKVIEDFDKDQADYEDVIEIISDESVEEEGIEEGIQQDEDIYEEGNY | |
| | | | | EEEGSEDVWEEGEDSDDSDLEDVLQVPNGWANPGKRGKTG* | |
| TSPYL2 | TSPY like 2 | 64061 | 124 | XEEAIIIVEDEDEDERESMRSSRRRRRRRRRKQRKVKRESRERNAER | 109. |
| | [Source:HGNC | | | MESILQALEDIQLDLEAVNIKAGKAFLRLKRKFIQMRRPFLERRDLII | |
| | Symbol; Acc:HGNC: | | | QHIPGFWVKALHSSVPQPPQNFNFDQPT* | |
| | 24358] | | | | |
| TSPYL2 | TSPY like 2 | 64061 | 250 | MDRPDEGPPAKTRRLSSSESPQRDPPPPPPPPPLLRLPLPPPQQRPRL | 110. |
| | [Source:HGNC | | | QEETEAAQIIKNDLWVNPLRYYLRERGSRIKRKKQEMKKRKTRGR | |
| | Symbol; Acc:HGNC: | | | CEVVIMEDAPDYYAVEDIFSEISDIDETIHDIKISDFMETTDYFETTD | |
| | 24358] | | | NEITDINENICDSENPDHNEVPNNETTDNNESADDHETTDNNESAD | |
| | | | | DNNENPEDNNKNTDDNEENPNNNENTYGNNFFKGGFWGSHGNNQ | |
| | | | | DSSDSDNEADEASDDEDND | |
| ZBTB7A | zinc finger and BTB | 51341 | 585 | MAGGVDGPIGIPFPDHSSDILSGLNEQRTQGLLCDVVILVEGREFPT | 111. |
| | domain containing 7A | | | HRSVLAACSQYFKKLFTSGAVVDQQNVYEIDFVSAEALTALMDFA | |
| | [Source:HGNC | | | YTATLTVSTANVGDILSAARLLEIPAVSHVCADLLDRQILAADAGA | |
| | Symbol; Acc:HGNC: | | | DAGQLDLVDQIDQRNLLRAKEYLEFFQSNPMNSLPPAAAAAAASFP | |
| | 18078] | | | WSAFGASDDDLDATKEAVAAAVAAVAAGDCNGLDFYGPGPPAER | |
| | | | | PPTGDGDEGDSNPGLWPERDEDAPTGGLFPPPVAPPAATQNGHYG | |
| | | | | RGGEEEAASLSEAAPEPGDSPGFLSGAAEGEDGDGPDVDGLAASTL | |
| | | | | LQQMMSSVGRAGAAAGDSDEESRADDKGVMDYYLKYFSGAHDG | |
| | | | | DVYPAWSQKVEKKIRAKAFQKCPICEKVIQGAGKLPRHIRTHTGEK | |
| | | | | PYECNICKVRFTRQDKLKVHMRKHTGEKPYLCQQCGAAFAHNYD | |
| | | | | LKNHMRVHTGLRPYQCDSCCKTFVRSDHLHRHLKKDGCNGVPSR | |
| | | | | RGRKPRVRGGAPDPSPGATATPGAPAQPSSPDARRNGQEKHFKDE | |
| | | | | DEDEDVASPDGLGRLNVAGAGGGGDSGGGPGAATDGNFTAGLA* | |
| SIRT1 | sirtuin 1 | 23411 | 748 | MADEAALALQPGGSPSAAGADREAASSPAGEPLRKRPRRDGPGLE | 112. |
| | [Source:HGNC | | | RSPGEPGGAAPEREVPAAARGCPGAAAAALWREAEAEAAAAGGE | |
| | Symbol; Acc:HGNC: | | | QEAQATAAAGEGDNGPGLQGPSREPPLADNLYDEDDDDEGEEEEE | |
| | 14929] | | | AAAAAIGYRDNLLFGDEIITNGFHSCESDEEDRASHASSSDWTPRPR | |
| | | | | IGPYTFVQQHLMIGTDPRTILKDLLPETIPPPELDDMTLWQIVINILSE | |
| | | | | PPKRKKRKDINTIEDAVKLLQECKKIIVLTGAGVSVSCGIPDFRSRD | |
| | | | | GIYARLAVDFPDLPDPQAMFDIEYFRKDPRPFFKFAKEIYPGQFQPS | |
| | | | | LCHKFIALSDKEGKLLRNYTQNIDTLEQVAGIQRIIQCHGSFATASCL | |
| | | | | ICKYKVDCEAVRGDIFNQVVPRCPRCPADEPLAIMKPEIVFFGENLP | |
| | | | | EQFHRAMKYDKDEVDLLIVIGSSLKVRPVALIPSSIPHEVPQILINREP | |
| | | | | LPHLHFDVELLGDCDVIINELCHRLGGEYAKLCCNPVKLSEITEKPP | |
| | | | | RTQKELAYLSELPPTPLHVSEDSSSPERTSPPDSSVIVTLLDQAAKSN | |
| | | | | DDLDVSESKGCMEEKPQEVQTSRNVESIAEQMENPDLKNVGSSTGE | |
| | | | | KNERTSVAGTVRKCWPNRVAKEQISRRLDGNQYLFLPPNRYIFHGA | |
| | | | | EVYSDSEDDVLSSSSCGSNSDSGTCQSPSLEEPMEDESEIEEFYNGLE | |
| | | | | DEPDVPERAGGAGFGTDGDDQEAINEAISVKQEVTDMNYPSNKS* | |
| SIRT1 | sirtuin 1 | 23411 | 445 | MCLCSGRKTILEIYPGQFQPSLCHKFIALSDKEGKLLRNYTQNIDTLE | 113. |
| | [Source:HGNC | | | QVAGIQRIIQCHGSFATASCLICKYKVDCEAVRGDIFNQVVPRCPRC | |
| | Symbol; Acc:HGNC: | | | PADEPLAIMKPEIVFFGENLPEQFHRAMKYDKDEVDLLIVIGSSLKV | |
| | 14929] | | | RPVALIPSSIPHEVPQILINREPLPHLHFDVELLGDCDVIINELCHRLG | |
| | | | | GEYAKLCCNPVKLSEITEKPPRTQKELAYLSELPPTPLHVSEDSSSPE | |
| | | | | RTSPPDSSVIVTLLDQAAKSNDDLDVSESKGCMEEKPQEVQTSRNV | |
| | | | | ESIAEQMENPDLKNVGSSTGEKNERTSVAGTVRKCWPNRVAKEQIS | |
| | | | | RRLDGNQYLFLPPNRYIFHGAEVYSDSEDDVLSSSSCGSNSDSGTCQ | |
| | | | | SPSLEEPMEDESEIEEFYNGLEDEPDVPERAGGAGFGTDGDDQEAIN | |
| | | | | EAISVKQEVTDMNYPSNKS* | |
| SIRT1 | sirtuin 1 | 23411 | 453 | MFDIEYFRKDPRPFFKFAKEIYPGQFQPSLCHKFIALSDKEGKLLRN | 114. |
| | [Source HGNC | | | YTQNIDTLEQVAGIQRIIQCHGSFATASCLICKYKVDCEAVRGDIFN | |
| | Symbol; Acc:HGNC: | | | QVVPRCPRCPADEPLAIMKPEIVFFGENLPEQFHRAMKYDKDEVDL | |
| | 14929] | | | LIVIGSSLKVRPVALIPSSIPHEVPQILINREPLPHLHFDVELLGDCDVI | |
| | | | | INELCHRLGGEYAKLCCNPVKLSEITEKPPRTQKELAYLSELPPTPLH | |
| | | | | VSEDSSSPERTSPPDSSVIVTLLDQAAKSNDDLDVSESKGCMEEKPQ | |
| | | | | EVQTSRNVESIAEQMENPDLKNVGSSTGEKNERTSVAGTVRKCWP | |
| | | | | NRVAKEQISRRLDGNQYLFLPPNRYIFHGAEVYSDSEDDVLSSSSCG | |
| | | | | SNSDSGTCQSPSLEEPMEDESEIEEFYNGLEDEPDVPERAGGAGFGT | |
| | | | | DGDDQEAINEAISVKQEVTDMNYPSNKS* | |
| MTMR8 | myotubularin related | 55613 | 705 | MDHITVPKVENVKLVDRYVSKKPANGILYLTATHLIYVEASGAAR | 115. |
| | protein 8 | | | KETWIALHHIATVEKLPITSLGCPLTLRCKNFRVAHFVLDSDLVCHE | |
| | [Source:HGNC | | | VYISLLKLSQPALPEDLYAFSYNPKSSKEMRESGWKLIDPISDFGRM | |
| | Symbol; Acc:HGNC:16 | | | GIPNRNWTITDANRNYEICSTYPPEIVVPKSVTLGTVVGSSKFRSKER | |
| | 825] | | | VPVLSYLYKENNAAICRCSQPLSGFYTRCVDDELLLEAISQTNPGSQ | |
| | | | | FMYVVDTRPKLNAMANRAAGKGYENEDNYANIRFRFMGIENIHV | |
| | | | | MRSSLQKLLEVCELKTPTMSEFLSGLESSGWLRHIKAIMDAGIFITK | |
| | | | | AVKVEKASVLVHCSDGWDRTAQVCSVASILLDPFYRTFKGLMILIE | |
| | | | | KEWISMGHKFSQRCGHLDGDSKEVSPIFTQFLDCIWQLMEQFPCAF | |
| | | | | EFNENFLLEIHDHVFSCQFGNFLGNCQKDREDLRVYEKTHSVWPFL | |
| | | | | VQRKPDFRNPLYKGFTMYGVLNPSTVPYNIQFWCGMYNRFDKGLQ | |
| | | | | PKQSMLESLLEIKKQRAMLETDVHELEKKLKVRDEPPEEICTCSQLG | |
| | | | | NILSQHLGSPLTNPLGFMGINGDLNTLMENGTLSREGGLRAQMDQV | |
| | | | | KSQGADLHHNCCEIVGSLRAINISGDVGISEAMGISGDMCTFEATGF | |
| | | | | SKDLGICGAMDISEATGISGNLGISEARGFSGDMGILGDTGISKASTK | |
| | | | | EADYSKHQ* | |
| DDIT4 | DNA damage inducible | 54541 | 233 | MPSLWDRFSSSSTSSSPSSLPRTPTPDRPPRSAWGSATREEGFDRSTS | 116. |
| | transcript 4 | | | LESSDCESLDSSNSGFGPEEDTAYLDGVSLPDFELLSDPEDEHLCAN | |
| | [Source:HGNC | | | LMQLLQESLAQARLGSRRPARLLMPSQLVSQVGKELLRLAYSEPCG | |
| | Symbol; Acc:HGNC: | | | LRGALLDVCVEQGKSCHSVGQLALDPSLVPTFQLTLVLRLDSRLWP | |
| | 24944] | | | KIQGLFSSANSPFLPGFSQSLTLSTGFRVIKKKLYSSEQLLIEEC* | |
| ZNF699 | zinc finger protein 699 | 374879 | 643 | MEEERKTAELQKNRIQDSVVFEDVAVDFTQEEWALLDLAQRNLYR | 117. |
| | [Source:HGNC | | | DVMLENFQNLASLGYPLHTPHLISQWEQEEDLQTVKRELIQGIFMG | |
| | Symbol; Acc:HGNC: | | | EHREGFETQLKTNESVASQDICGEKISNEQKIVRFKRNDSWFSSLHE | |
| | 24750] | | | NQESCGIDYQNKSHERHLRNHMVENIYECYEENQDGQTFSQVPNL | |
| | | | | DSLKRNTEVKSCECHECGKAFVDHSSLKSHIRSHTGSKPYQCKECG | |
| | | | | KAFHFLACFKKHMKTPTEEKPYECKECTKAFSCSSFFRAHMKIHIG | |
| | | | | KTNYECKECGKGFSCSSSLTEHKRIHSGDKPYECKECGKAFSCSSSL | |
| | | | | SKHKRIHSGDKPYECKECGKAFSSSSHLIIHIRIHTGEKPYECKECGK | |
| | | | | AFSESSKLTVHGRTHTGEKPYKCKECGKAYNCPSSLSIHMRKHTGE | |
| | | | | KPYECLECGKAFYLPTSLNTHVKNQSREKPYECKECGKAFSCPSSF | |
| | | | | RAHVRDHTGKIQYECKECGKTFSRSSSLTEHLRTHSGEKPYECKEC | |
| | | | | GKAFISSSHLTVHIRTHTGEKPYECKKCGKAFIYPSALRIHMRTHTG | |
| | | | | EKPYECKECGKAFRHSSYLTVHARMHTGEKPFECLECGKAFSCPSS | |
| | | | | FRRHVRSHTGEKPYECKECGKAFVCPAYFRRHVKTHTRENI* | |
| GLA | galactosidase alpha | 2717 | 430 | MQLRNPELHLGCALALRFLALVSWDIPGARALDNGLARTPTMGWL | 118. |
| | [Source:HGNC | | | HWERFMCNLDCQEEPDSCISEKLFMEMAELMVSEGWKDAGYEYL | |
| | Symbol; Acc:HGNC: | | | CIDDCWMAPQRDSEGRLQADPQRFPHGIRQLANYVHSKGLKLGIY | |
| | 4296] | | | ADVGNKTCAGFPGSFGYYDIDAQTFADWGVDLLKFDGCYCDSLEN | |
| | | | | LADGYKHMSLALNRTGRSIVYSCEWPLYMWPFQKPNYTEIRQYCN | |
| | | | | HWRNFADIDDSWKSIKSILDWTSFNQERIVDVAGPGGWNDPDMLV | |
| | | | | IGNFGLSWNQQVTQMALWAIMAAPLFMSNDLRHISPQAKALLQDK | |
| | | | | DVIAINQDPLGKQGYQLRQGDNFEVWERPLSGLAWAVAMINRQEI | |
| | | | | GGPRSYTIAVASLGKGVACNPACFITQLLPVKRKLGFYEWTSRLRS | |
| | | | | HINPTGTVLLQLENTMQMSLKDLL* | |
| GLA | galactosidase alpha | 2717 | 200 | XDIPGARALDNGLARTPTMGWLHWERFMCNLDCQEEPDSCISEKL | 119. |
| | [Source:HGNC | | | FMEMAELMVSEGWKDAGYEYLCIDDCWMAPQRDSEGRLQADPQ | |
| | Symbol; Acc:HGNC: | | | RFPHGIRQLANYVHSKGLKLGIYADVGNKTCAGFPGSFGYYDIDAQ | |
| | 4296] | | | TFADWGVDLLKFDGCYCDSLENLADGESRLSIGHRERSIFIPAFPQY | |
| | | | | THHLCTTSSEQSQQSGRL* | |
| GLA | galactosidase alpha | 2717 | 223 | MQLRNPELHLGCALALRFLALVSWDIPGARALDNGLARTPTMGWL | 120. |
| | [Source:HGNC | | | HWERFMCNLDCQEEPDSCISEKLFMEMAELMVSEGWKDAGYEYL | |
| | Symbol; Acc:HGNC: | | | CIDDCWMAPQRDSEGRLQADPQRFPHGIRQLANYVHSKGLKLGIY | |
| | 4296] | | | ADVGNKTCAGFPGSFGYYDIDAQTFADWGVDLLKFDGCYCDSLEN | |
| | | | | LADGYKHMSLALNRTGRSIVYSCEWPLYMWPFQKSSTLFGSIC* | |
| GLA | galactosidase alpha | 2717 | 200 | MQLRNPELHLGCALALRFLALVSWDIPGARALDNGLARTPTMGWL | 121. |
| | [Source:HGNC | | | HWERFMCNLDCQEEPDSCISEKLFMEMAELMVSEGWKDAGYEYL | |
| | Symbol; Acc:HGNC: | | | CIDDCWMAPQRDSEGRLQADPQRFPHGIRQLANYVHSKGLKLGIY | |
| | 4296] | | | ADVGNKTCAGFPGSFGYYDIDAQTFADWGVDLLKFDGCYCDSLEN | |
| | | | | LADAQLYRNPTVLQSLAKFC* | |
| GLA | galactosidase alpha | 2717 | 471 | MQLRNPELHLGCALALRFLALVSWDIPGARALDNGLARTPTMGWL | 122. |
| | [Source:HGNC | | | HWERFMCNLDCQEEPDSCISWSFALVAQAGVQCHDLGSPQPPPPRF | |
| | Symbol; Acc:HGNC: | | | KQFSCLILASSWNYSEKLFMEMAELMVSEGWKDAGYEYLCIDDC | |
| | 4296] | | | WMAPQRDSEGRLQADPQRFPHGIRQLANYVHSKGLKLGIYADVGN | |
| | | | | KTCAGFPGSFGYYDIDAQTFADWGVDLLKFDGCYCDSLENLADGY | |
| | | | | KHMSLALNRTGRSIVYSCEWPLYMWPFQKPNYTEIRQYCNHWRNF | |
| | | | | ADIDDSWKSIKSILDWTSFNQERIVDVAGPGGWNDPDMLVIGNFGL | |
| | | | | SWNQQVTQMALWAIMAAPLFMSNDLRHISPQAKALLQDKDVIAIN | |
| | | | | QDPLGKQGYQLRQGDNFEVWERPLSGLAWAVAMINRQEIGGPRSY | |
| | | | | TIAVASLGKGVACNPACFITQLLPVKRKLGFYEWTSRLRSHINPTGT | |
| | | | | VLLQLENTMQMSLKDLL* | |
| GLA | galactosidase alpha | 2717 | 199 | DIPGARALDNGLARTPTMGWLHWERFMCNLDCQEEPDSCISEKLF | 123. |
| | [Source:HGNC | | | MEMAELMVSEGWKDAGYEYLCIDDCWMAPQRDSEGRLQADPQR | |
| | Symbol; Acc:HGNC: | | | FPHGIRQLANYVHSKGLKLGIYADVGNKTCAGFPGSFGYYDIDAQT | |
| | 4296] | | | FADWGVDLLKFDGCYCDSLENLADGESRLSIGHRERSIFIPAFPQYT | |
| | | | | HHLCTTSSEQSQQSGRL* | |
| GLA | galactosidase alpha | 2717 | 363 | MQLRNPELHLGCALALRFLALVSWDIPGARALDNGLARTPTMGWL | 124. |
| | [Source:HGNC | | | HWERFMCNLDCQEEPDSCISEKLFMEMAELMVSEGWKDAGYEYL | |
| | Symbol; Acc:HGNC: | | | CIDDCWMAPQRDSEGRLQADPQRFPHGIRQLANYVHSKGLKLGIY | |
| | 4296] | | | ADVGNKTCAGFPGSFGYYDIDAQTFADWGVDLLKFDGCYCDSLEN | |
| | | | | LADGYKHMSLALNRTGRSIVYSCEWPLYMWPFQKPNYTEIRQYCN | |
| | | | | HWRNFADIDDSWKSIKSILDWTSFNQERIVDVAGPGGWNDPDMLV | |
| | | | | IGNFGLSWNQQVTQMALWAIMAAPLFMSNDLRHISPQAKALLQDK | |
| | | | | DVIAINQDPLGKQGYQLRQVNKSIYFKMALYTQYQLCLGPKSIFFPC | |
| | | | | S* | |
| GLA | galactosidase alpha | 2717 | 364 | MQLRNPELHLGCALALRFLALVSWDIPGARALDNGLARTPTMGWL | 125. |
| | [Source:HGNC | | | HWERFMCNLDCQEEPDSCISEKLFMEMAELMVSEGWKDAGYEYL | |
| | Symbol; Acc:HGNC: | | | CIDDCWMAPQRDSEGRLQADPQRFPHGIRQLANYVHSKGLKLGIY | |
| | 4296] | | | ADVGNKTCAGFPGSFGYYDIDAQTFADWGVDLLKFDGCYCDSLEN | |
| | | | | LADGYKHMSLALNRTGRSIVYSCEWPLYMWPFQKPNYTEIRQYCN | |
| | | | | HWRNFADIDDSWKSIKSILDWTSFNQERIVDVAGPGGWNDPDMGD | |
| | | | | NFEVWERPLSGLAWAVAMINRQEIGGPRSYTIAVASLGKGVACNP | |
| | | | | ACFITQLLPVKRKLGFYEWTSRLRSHINPTGTVLLQLENTMQMSLK | |
| | | | | DLL* | |
| GLA | galactosidase alpha | 2717 | 418 | MQLRNPELHLGCALALRFLALVSWDIPGARALDNGLARTPTMGWL | 126. |
| | [Source:HGNC | | | HWERFMCNLDCQEEPDSCISEKLFMEMAELMVSEGWKDAGYEYL | |
| | Symbol; Acc:HGNC: | | | CIDDCWMAPQRDSEGRLQADPQRFPHGIRQLANYVHSKGLKLGIY | |
| | 4296] | | | ADVGNKTCAGFPGSFGYYDIDAQTFADWGVDLLKFDGYKHMSLA | |
| | | | | LNRTGRSIVYSCEWPLYMWPFQKPNYTEIRQYCNHWRNFADIDDS | |
| | | | | WKSIKSILDWTSFNQERIVDVAGPGGWNDPDMLVIGNFGLSWNQQ | |
| | | | | VTQMALWAIMAAPLFMSNDLRHISPQAKALLQDKDVIAINQDPLG | |
| | | | | KQGYQLRQGDNFEVWERPLSGLAWAVAMINRQEIGGPRSYTIAVA | |
| | | | | SLGKGVACNPACFITQLLPVKRKLGFYEWTSRLRSHINPTGTVLLQL | |
| | | | | ENTMQMSLKDLL* | |
| GLA | galactosidase alpha | 2717 | 271 | MQLRNPELHLGCALALRFLALVSWDIPGARALDNGLARTPTMGWL | 127. |
| | [Source:HGNC | | | HWERFMCNLDCQEEPDSCISEKLFMEMAELMVSEGWKDAGYEYL | |
| | Symbol; Acc:HGNC: | | | CIDDCWMAPQRDSEGRLQADPQRFPHGIRQLANYVHSKGLKLGIY | |
| | 4296] | | | ADVGNKTCAGFPGSFGYYDIDAQTFADWGVDLLKFDGCYCDSLEN | |
| | | | | LADGYKHMSLALNRTGRSIVYSCEWPLYMWPFQKPNYTEIRQYCN | |
| | | | | HWRNFADIDDSWKSIKSILDWTSFNQERIVDVAGPGGWNDPDMVK | |
| | | | | T* | |
| LRRC8A | leucine rich repeat | 56262 | 811 | MIPVTELRYFADTQPAYRILKPWWDVFTDYISIVMLMIAVFGGTLQ | 128. |
| | containing 8 VRAC | | | VTQDKMICLPCKWVTKDSCNDSFRGWAAPGPEPTYPNSTILPTPDT | |
| | subunit A | | | GPTGIKYDLDRHQYNYVDAVCYENRLHWFAKYFPYLVLLHTLIFL | |
| | [Source:HGNC | | | ACSNFWFKFPRTSSKLEHFVSILLKCFDSPWTTRALSETVVEESDPK | |
| | Symbol; Acc:HGNC:19 | | | PAFSKMNGSMDKKSSTVSEDVEATVPMLQRTKSRIEQGIVDRSETG | |
| | 027] | | | VLDKKEGEQAKALFEKVKKFRTHVEEGDIVYRLYMRQTIIKVIKFIL | |
| | | | | IICYTVYYVHNIKFDVDCTVDIESLTGYRTYRCAHPLATLFKILASFY | |
| | | | | ISLVIFYGLICMYTLWWMLRRSLKKYSFESIREESSYSDIPDVKNDF | |
| | | | | AFMLHLIDQYDPLYSKRFAVFLSEVSENKLRQLNLNNEWTLDKLR | |
| | | | | QRLTKNAQDKLELHLFMLSGIPDTVFDLVELEVLKLELIPDVTIPPSI | |
| | | | | AQLTGLKELWLYHTAAKIEAPALAFLRENLRALHIKFTDIKEIPLWI | |
| | | | | YSLKTLEELHLTGNLSAENNRYIVIDGLRELKRLKVLRLKSNLSKLP | |
| | | | | QVVTDVGVHLQKLSINNEGTKLIVLNSLKKMANLTELELIRCDLERI | |
| | | | | PHSIFSLHNLQEIDLKDNNLKTIEEIISFQHLHRLTCLKLWYNHIAYIP | |
| | | | | IQIGNLTNLERLYLNRNKIEKIPTQLFYCRKLRYLDLSHNNLTFLPAD | |
| | | | | IGLLQNLQNLAITANRIETLPPELFQCRKLRALHLGNNVLQSLPSRV | |
| | | | | GELTNLTQIELRGNRLECLPVELGECPLLKRSGLVVEEDLFNTLPPE | |
| | | | | VKERLWRADKEQA* | |
| S1PR2 | sphingosine-1- | 9294 | 354 | MGSLYSEYLNPNKVQEHYNYTKETLETQETTSRQVASAFIVILCCAI | 129. |
| | phosphate receptor 2 | | | VVENLLVLIAVARNSKFHSAMYLFLGNLAASDLLAGVAFVANTLL | |
| | [Source:HGNC | | | SGSVTLRLTPVQWFAREGSAFITLSASVFSLLAIAIERHVAIAKVKLY | |
| | Symbol; Acc:HGNC: | | | GSDKSCRMLLLIGASWLISLVLGGLPILGWNCLGHLEACSTVLPLY | |
| | 3169] | | | AKHYVLCVVTIFSIILLAIVALYVRIYCVVRSSHADMAAPQTLALLK | |
| | | | | TVTIVLGVFIVCWLPAFSILLLDYACPVHSCPILYKAHYFFAVSTLNS | |
| | | | | LLNPVIYTWRSRDLRREVLRPLQCWRPGVGVQGRRRGGTPGHHLL | |
| | | | | PLRSSSSLERGMHMPTSPTFLEGNTVV* | |
| ICAM1 | intercellular adhesion | 3383 | 533 | MAPSSPRPALPALLVLLGALFPGPGNAQTSVSPSKVILPRGGSVLVT | 130. |
| | molecule 1 | | | CSTSCDQPKLLGIETPLPKKELLLPGNNRKVYELSNVQEDSQPMCYS | |
| | [Source:HGNC | | | NCPDGQSTAKTFLTVYWTPERVELAPLPSWQPVGKNLTLRCQVEG | |
| | Symbol; Acc:HGNC: | | | GAPRANLTVVLLRGEKELKREPAVGEPAEVTTTVLVRRDHHGANF | |
| | 5344] | | | SCRTELDLRPQGLELFENTSAPYQLQTFVLPATPPQLVSPRVLEVDT | |
| | | | | QGTVVCSLDGLFPVSEAQVHLALGDQRLNPTVTYGNDSFSAKASV | |
| | | | | SVTAEDEGTQRLTCAVILGNQSQETLQTVTIYSFPAPNVILTKPEVSE | |
| | | | | GTEVTVKCEAHPRAKVTLNGVPAQPLGPRAQLLLKATPEDNGRSFS | |
| | | | | CSATLEVAGQLIHKNQTRELRVLYGPRLDERDCPGNWTWPENSQQ | |
| | | | | TPMCQAWGNPLPELKCLKDGTFPLPIGESVTVTRDLEGTYLCRARS | |
| | | | | TQGEVTRKVTVNVLSPRYEIVIITVVAAAVIMGTAGLSTYLYNRQR | |
| | | | | KIKKYRLQQAQKGTPMKPNTQATPP* | |
| ICAM1 | intercellular adhesion | 3383 | 311 | MAPSSPRPALPALLVLLGALFPVSEAQVHLALGDQRLNPTVTYGND | 131. |
| | molecule 1 | | | SFSAKASVSVTAEDEGTQRLTCAVILGNQSQETLQTVTIYSFPAPNVI | |
| | [Source:HGNC | | | LTKPEVSEGTEVTVKCEAHPRAKVTLNGVPAQPLGPRAQLLLKATP | |
| | Symbol; Acc:HGNC: | | | EDNGRSFSCSATLEVAGQLIHKNQTRELRVLYGPRLDERDCPGNWT | |
| | 5344] | | | WPENSQQTPMCQAWGNPLPELKCLKDGTFPLPIGESVTVTRDLEGT | |
| | | | | YLCRARSTQGEVTRKVTVNVLSPRYEIVIITVVAAAVIMGTAGLSTY | |
| | | | | LYNRQRKIKKYRLQQAQKGTPMKPNTQATPP* | |
| ICAM1 | intercellular adhesion | 3383 | 180 | MAPSSPRPALPALLVLLGALFPGPGNAQTSVSPSKVILPRGGSVLVT | 132. |
| | molecule 1 | | | CSTSCDQPKLLGIETPLPKKELLLPGNNRKVYELSNVQEDSQPMCYS | |
| | [Source:HGNC | | | NCPDGQSTAKTFLTVYWTPERVEGGAPRANLTVVLLRGEKELKRE | |
| | Symbol; Acc:HGNC: | | | PAVGEPAEVTTTVLVRRDHHGANFSCRTELDLRPQGLELFE | |
| | 5344] | | | | |
| AMMECR1 | AMMECR nuclear | 9949 | 334 | MAAGCCGVKKQKLSSSPPSGSGGGGGASSSSHCSGESQCRAGELGL | 133. |
| | protein 1 | | | GGAGTRLNGLGGLTGGGSGSGCTLSPPQGCGGGGGGIALSPPPSCG | |
| | [Source:HGNC | | | VGTLLSTPAAATSSSPSSSSAASSSSPGSRKMVVSAEMCCFCFDVLY | |
| | Symbol; Acc:HGNC: | | | CHLYGYQQPRTPRFTNEPYPLFVTWKIGRDKRLRGCIGTFSAMNLH | |
| | 467] | | | SGLREYTLTSALKDSRFPPMTRDELPRLFCSVSLLTNFEDVCDYLD | |
| | | | | WEVGVHGIRIEFINEKGSKRTATYLPEVAKEQGWDHIQTIDSLLRKG | |
| | | | | GYKAPITNEFRKTIKLTRYRSEKMTLSYAEYLAHRQHHHFQNGIGH | |
| | | | | PLPPYNHYS* | |
| AMMECR1 | AMMECR nuclear | 9949 | 211 | MVVSAEMCCFCFDVLYCHLYGYQQPRTPRFTNEPYPLFVTWKIGR | 134. |
| | protein 1 | | | DKRLRGCIGTFSAMNLHSGLREYTLTSALKDSRFPPMTRDELPRLFC | |
| | [Source:HGNC | | | SVSLLTNFEDVCDYLDWEVGVHGIRIEFINEKGSKRTATYLPEVAKE | |
| | Symbol; Acc:HGNC: | | | QGWDHIQTIDSLLRKGGYKAPITNEFRKTIKLTRYRSEKMTLSYAEY | |
| | 467] | | | LAHRQHHHFQNGIGHPLPPYNHYS* | |
| AMMECR1 | AMMECR nuclear | 9949 | 297 | MAAGCCGVKKQKLSSSPPSGSGGGGGASSSSHCSGESQCRAGELGL | 135. |
| | protein 1 | | | GGAGTRLNGLGGLTGGGSGSGCTLSPPQGCGGGGGGIALSPPPSCG | |
| | [Source:HGNC | | | VGTLLSTPAAATSSSPSSSSAASSSSPGSRKMVVSAEMCCFCFDVLY | |
| | Symbol; Acc:HGNC: | | | CHLYGYQQPRTPRFTNEPYALKDSRFPPMTRDELPRLFCSVSLLTNF | |
| | 467] | | | EDVCDYLDWEVGVHGIRIEFINEKGSKRTATYLPEVAKEQGWDHIQ | |
| | | | | TIDSLLRKGGYKAPITNEFRKTIKLTRYRSEKMTLSYAEYLAHRQHH | |
| | | | | HFQNGIGHPLPPYNHYS* | |
| HMGCR | 3-hydroxy-3- | 3156 | 889 | MLSRLFRMHGLFVASHPWEVIVGTVTLTICMMSMNMFTGNNKICG | 136. |
| | methylglutaryl-CoA | | | WNYECPKFEEDVLSSDIIILTITRCIAILYIYFQFQNLRQLGSKYILGIA | |
| | reductase | | | GLFTIFSSFVFSTVVIHFLDKELTGLNEALPFFLLLIDLSRASTLAKFA | |
| | [Source:HGNC | | | LSSNSQDEVRENIARGMAILGPTFTLDALVECLVIGVGTMSGVRQL | |
| | Symbol; Acc:HGNC: | | | EIMCCFGCMSVLANYFVFMTFFPACVSLVLELSRESREGRPIWQLSH | |
| | 5006] | | | FARVLEEEENKPNPVTQRVKMIMSLGLVLVHAHSRWIADPSPQNST | |
| | | | | ADTSKVSLGLDENVSKRIEPSVSLWQFYLSKMISMDIEQVITLSLAL | |
| | | | | LLAVKYIFFEQTETESTLSLKNPITSPVVTQKKVPDNCCRREPMLVR | |
| | | | | NNQKCDSVEEETGINRERKVEVIKPLVAETDTPNRATFVVGNSSLL | |
| | | | | DTSSVLVTQEPEIELPREPRPNEECLQILGNAEKGAKFLSDAEIIQLV | |
| | | | | NAKHIPAYKLETLMETHERGVSIRRQLLSKKLSEPSSLQYLPYRDYN | |
| | | | | YSLVMGACCENVIGYMPIPVGVAGPLCLDEKEFQVPMATTEGCLV | |
| | | | | ASTNRGCRAIGLGGGASSRVLADGMTRGPVVRLPRACDSAEVKAW | |
| | | | | LETSEGFAVIKEAFDSTSRFARLQKLHTSIAGRNLYIRFQSRSGDAM | |
| | | | | GMNMISKGTEKALSKLHEYFPEMQILAVSGNYCTDKKPAAINWIEG | |
| | | | | RGKSVVCEAVIPAKVVREVLKTTTEAMIEVNINKNLVGSAMAGSIG | |
| | | | | GYNAHAANIVTAIYIACGQDAAQNVGSSNCITLMEASGPTNEDLYI | |
| | | | | SCTMPSIEIGTVGGGTNLLPQQACLQMLGVQGACKDNPGENARQL | |
| | | | | ARIVCGTVMAGELSLMAALAAGHLVKSHMIHNRSKINLQDLQGAC | |
| | | | | TKKTA* | |
| HMGCR | 3-hydroxy-3- | 3156 | 836 | MLSRLFRMHGLFVASHPWEVIVGTVTLTICMMSMNMFTGNNKICG | 137. |
| | methylglutaryl-CoA | | | WNYECPKFEEDVLSSDIIILTITRCIAILYIYFQFQNLRQLGSKYILGIA | |
| | reductase | | | GLFTIFSSFVFSTVVIHFLDKELTGLNEALPFFLLLIDLSRASTLAKFA | |
| | [Source:HGNC | | | LSSNSQDEVRENIARGMAILGPTFTLDALVECLVIGVGTMSGVRQL | |
| | Symbol; Acc:HGNC: | | | EIMCCFGCMSVLANYFVFMTFFPACVSLVLELSRESREGRPIWQLSH | |
| | 5006] | | | FARVLEEEENKPNPVTQRVKMIMSLGLVLVHAHSRWIADPSPQNST | |
| | | | | ADTSKVSLGLDENVSKRIEPSVSLWQFYLSKMISMDIEQVITLSLAL | |
| | | | | LLAVKYIFFEQTETESTLSLKNPITSPVVTQKKVPDNCCRREPMLVR | |
| | | | | NNQKCDSVEEETGINRERKVEVIKPLVAETDTPNRATFVVGNSSLL | |
| | | | | DTSSVLVTQEPEIELPREPRPNEECLQILGNAEKGAKFLSDAEIIQLV | |
| | | | | NAKHIPAYKLETLMETHERGVSIRRQLLSKKLSEPSSLQYLPYRDYN | |
| | | | | YSLLGGGASSRVLADGMTRGPVVRLPRACDSAEVKAWLETSEGFA | |
| | | | | VIKEAFDSTSRFARLQKLHTSIAGRNLYIRFQSRSGDAMGMNMISK | |
| | | | | GTEKALSKLHEYFPEMQILAVSGNYCTDKKPAAINWIEGRGKSVVC | |
| | | | | EAVIPAKWREVLKTTTEAMIEVNINKNLVGSAMAGSIGGYNAHA | |
| | | | | ANIVTAIYIACGQDAAQNVGSSNCITLMEASGPTNEDLYISCTMPSIE | |
| | | | | IGTVGGGTNLLPQQACLQMLGVQGACKDNPGENARQLARIVCGTV | |
| | | | | MAGELSLMAALAAGHLVKSHMIHNRSKINLQDLQGACTKKTA* | |
| HMGCR | 3-hydroxy-3- | 3156 | 18 | MLSRLFRMHGLFVASHPW | 138. |
| | methylglutaryl-CoA | | | | |
| | reductase | | | | |
| | [Source:HGNC | | | | |
| | Symbol; Acc:HGNC: | | | | |
| | 5006] | | | | |
| HMGCR | 3-hydroxy-3- | 3156 | 116 | YFPEMQILAVSGNYCTDKKPAAINWIEGRGKSVVCEAVIPAKVVRE | 139. |
| | methylglutaryl-CoA | | | MLGVQGACKDNPGENARQLARIVCGTVMAGELSLMAALAAGHLV | |
| | reductase | | | KSHMIHNRSKINLQDLQGACTKKTA* | |
| | [Source:HGNC | | | | |
| | Symbol; Acc:HGNC: | | | | |
| | 5006] | | | | |
| HMGCR | 3-hydroxy-3- | 3156 | 166 | XHEYFPEMQILAVSGNYCTDKKPAAINWIEGRGKSVVCEAVIPAKV | 140. |
| | methylglutaryl-CoA | | | VREVLKTTTEAMIEVNINKNLVGSAMAGSIGGYNAHAANIVTAIYI | |
| | reductase | | | ACGQMLGVQGACKDNPGENARQLARIVCGTVMAGELSLMAALAA | |
| | [Source:HGNC | | | GHLVKSHMIHNRSKINLQDLQGACTKKTA* | |
| | Symbol; Acc:HGNC: | | | | |
| | 5006] | | | | |
| HMGCR | 3-hydroxy-3- | 3156 | 111 | MLSRLFRMHGLFVASHPWEVIVGTVTLTICMMSMNMFTGNNKICG | 141. |
| | methylglutaryl-CoA | | | WNYECPKFEEDVLSSDIIILTITRCIAILYIYFQFQNLRQLGSKYILGIA | |
| | reductase | | | GLFTIFSSFVFSTVVI | |
| | [Source:HGNC | | | | |
| | Symbol; Acc:HGNC: | | | | |
| | 5006] | | | | |
| MOSPD1 | motile sperm domain | 56180 | 214 | MHQQKRQPELVEGNLPVFVFPTELIFYADDQSTHKQVLTLYNPYEF | 142. |
| | containing 1 | | | ALKFKVLCTTPNKYVVVDAAGAVKPQCCVDIVIRHRDVRSCHYGV | |
| | [Source:HGNC | | | IDKFRLQVSEQSQRKALGRKEVVATLLPSAKEQQKEEEEKRLKEHL | |
| | Symbol; Acc:HGNC: | | | TESLFFEQSFQPENRAVSSGPSLLTVFLGVVCIAALMLPTLGDVESL | |
| | 25235] | | | VPLYLHLSVNQKLVAAYILGLITMAILRT* | |
| MOSPD1 | motile sperm domain | 56180 | 215 | MHQQKRQPELVEGNLPVFVFPTELIFYADDQSTHKQVLTLYNPYEF | 143. |
| | containing 1 | | | ALKFKVLCTTPNKYVVVDAAGAVKPQCCVDIVIRHRDVRSCHYGV | |
| | [Source:HGNC | | | IDKFRLQVSEQSQRKALGRKEVVATLLPSAKEQQKEEEEKRLKEHL | |
| | Symbol; Acc:HGNC: | | | TESLFFEQSFQPGKNRAVSSGPSLLTVFLGVVCIAALMLPTLGDVES | |
| | 25235] | | | LVPLYLHLSVNQKLVAAYILGLITMAILRT* | |
| MOSPD1 | motile sperm domain | 56180 | 160 | MHQQKRQPELVEGNLPVFVFPTELIFYADDQSTHKQVLTLYNPYEF | 144. |
| | containing 1 | | | ALKFKVLCTTPNKYVVVDAAGAVKPQCCVDIVIRHRDVRSCHYGV | |
| | [Source:HGNC | | | IDKFRLQVSEQSQRKALGRKEVVATLLPSAKEQQKEEEEKRLKEHL | |
| | Symbol; Acc:HGNC: | | | TESLFFEQSFQPGLITMAILRT* | |
| | 25235] | | | | |
| SULT1A2 | sulfotransferase family | 6799 | 296 | MELIQDISRPPLEYVKGVPLIKYFAEALGPLQSFQARPDDLLISTYPK | 145. |
| | 1A member 2 | | | SGTTWVSQILDMIYQGGDLEKCHRAPIFMRVPFLEFKVPGIPSGMET | |
| | [Source:HGNC | | | LKNTPAPRLLKTHLPLALLPQTLLDQKVKVVYVARNAKDVAVSYY | |
| | Symbol; Acc:HGNC: | | | HFYHMAKVYPHPGTWESFLEKFMAGEVSYGSWYQHVQEWWELS | |
| | 11454] | | | RTHPVLYLFYEDMKENPKREIQKILEFVGRSLPEETVDLMVEHTSFK | |
| | | | | EMKKNPMTNYTTVRREFMDHSISPFMRKGMAGDWKTTFTVAQNE | |
| | | | | RFDADYAKKMAGCSLSFRSEL* | |
| SULT1A2 | sulfotransferase family | 6799 | 222 | MELIQDISRPPLEYVKGVPLIKYFAEALGPLQSFQARPDDLLISTYPK | 146. |
| | 1A member 2 | | | SGTTWVSQILDMIYQGGDLEKCHRAPIFMRVPFLEFKVPGIPSGVCV | |
| | [Source:HGNC | | | LGARGVEEDRAGASAHQTFPDPLLRDGDSEKHTSPTTPEDTPAPGS | |
| | Symbol; Acc:HGNC: | | | APPDSVGSEGQGGLCCPQRKGCGGFLLPLLPHGQSVPSPWDLGKLP | |
| | 11454] | | | GEVHGWRSVLWVLVPARARVVGAEPHPPCSLPLL* | |
| SULT1A2 | sulfotransferase family | 6799 | 192 | MELIQDISRPPLEYVKGVPLIKYFAEALGPLQSFQARPDDLLISTYPK | 147. |
| | 1A member 2 | | | SGTTWVSQILDMIYQGGDLEKCHRAPIFMRVPFLEFKVPGIPSGMET | |
| | [Source:HGNC | | | LKNTPAPRLLKTHLPLALLPQTLLDQKVKVVYVARNAKDVAVSYY | |
| | Symbol; Acc:HGNC: | | | HFYHMAKVYPHPGTWESFLEKFMAGEVSYGSWYQHVQEWWELS | |
| | 11454] | | | RTHPVLYLF | |
| SULT1A2 | sulfotransferase family | 6799 | 263 | MELIQDISRPPLEYVKGVPLIKYFAEALGPLQSFQARPDDLLISTYPK | 148. |
| | 1A member 2 | | | SGTTWVSQILDMIYQGGDLEKCHRAPIFMRVPFLEFKVPGIPSGVCV | |
| | [Source:HGNC | | | LGARGVEEDRAGASAHQTFPDPLLRDGDSEKHTSPTTPEDTPAPGS | |
| | Symbol; Acc:HGNC: | | | APPDSVGSEGQAIQASTEEPSAAQNPKREIQKILEFVGRSLPEETVDL | |
| | 11454] | | | MVEHTSFKEMKKNPMTNYTTVRREFMDHSISPFMRKGMAGDWKT | |
| | | | | TFTVAQNERFDADYAKKMAGCSLSFRSEL* | |
| ZHX2 | zinc fingers and | 22882 | 838 | MASKRKSTTPCMVRTSQVVEQDVPEEVDRAKEKGIGTPQPDVAKD | 149. |
| | homeoboxes 2 | | | SWAAELENSSKENEVIEVKSMGESQSKKLQGGYECKYCPYSTQNL | |
| | [Source:HGNC | | | NEFTEHVDMQHPNVILNPLYVCAECNFTTKKYDSLSDHNSKFHPGE | |
| | Symbol; Acc:HGNC: | | | ANFKLKLIKRNNQTVLEQSIETTNHVVSITTSGPGTGDSDSGISVSKT | |
| | 18513] | | | PIMKPGKPKADAKKVPKKPEEITPENHVEGTARLVTDTAEILSRLGG | |
| | | | | VELLQDTLGHVMPSVQLPPNINLVPKVPVPLNTTKYNSALDTNATM | |
| | | | | INSFNKFPYPTQAELSWLTAASKHPEEHIRIWFATQRLKHGISWSPE | |
| | | | | EVEEARKKMFNGTIQSVPPTITVLPAQLAPTKVTQPILQTALPCQILG | |
| | | | | QTSLVLTQVTSGSTTVSCSPITLAVAGVTNHGQKRPLVTPQAAPEPK | |
| | | | | RPHIAQVPEPPPKVANPPLTPASDRKKTKEQIAHLKASFLQSQFPDD | |
| | | | | AEVYRLIEVTGLARSEIKKWFSDHRYRCQRGIVHITSESLAKDQLAI | |
| | | | | AASRHGRTYHAYPDFAPQKFKEKTQGQVKILEDSFLKSSFPTQAEL | |
| | | | | DRLRVETKLSRREIDSWFSERRKLRDSMEQAVLDSMGSGKKGQDV | |
| | | | | GAPNGALSRLDQLSGAQLTSSLPSPSPAIAKSQEQVHLLRSTFARTQ | |
| | | | | WPTPQEYDQLAAKTGLVRTEIVRWFKENRCLLKTGTVKWMEQYQ | |
| | | | | HQPMADDHGYDAVARKATKPMAESPKNGGDVVPQYYKDPKKLC | |
| | | | | EEDLEKLVTRVKVGSEPAKDCLPAKPSEATSDRSEGSSRDGQGSDE | |
| | | | | NEESSVVDYVEVTVGEEDAISDRSDSWSQAAAEGVSELAESDSDCV | |
| | | | | PAEAGQA* | |
| ZHX2 | zinc fingers and | 22882 | 166 | MASKRKSTTPCMVRTSQVVEQDVPEEVDRAKEKGIGTPQPDVAKD | 150. |
| | homeoboxes 2 | | | SWAAELENSSKENEVIEVKSMGESQSKKLQGGYECKYCPYSTQNL | |
| | [Source:HGNC | | | NEFTEHVDMQHPNVILNPLYVCAECNFTTKKYDSLSDHNSKFHPGE | |
| | Symbol; Acc:HGNC: | | | ANFKLKLIKRNNQTVLEQSIETTNHVVSIT | |
| | 18513] | | | | |
| SQLE | squalene epoxidase | 6713 | 575 | MWTFLGIATFTYFYKKFGDFITLANREVLLCVLVFLSLGLVLSYRCR | 151. |
| | [Source:HGNC | | | HRNGGLLGRQQSGSQFALFSDILSGLPFIGFFWAKSPPESENKEQLE | |
| | Symbol; Acc:HGNC: | | | ARRRRKGTNISETSLIGTAACTSTSSQNDPEVIIVGAGVLGSALAAV | |
| | 11279] | | | LSRDGRKVTVIERDLKEPDRIVGEFLQPGGYHVLKDLGLGDTVEGL | |
| | | | | DAQVVNGYMIHDQESKSEVQIPYPLSENNQVQSGRAFHHGRFIMSL | |
| | | | | RKAAMAEPNAKFIEGVVLQLLEEDDVVMGVQYKDKETGDIKELH | |
| | | | | APLTVVADGLFSKFRKSLVSNKVSVSSHFVGFLMKNAPQFKANHA | |
| | | | | ELILANPSPVLIYQISSSETRVLVDIRGEMPRNLREYMVEKIYPQIPD | |
| | | | | HLKEPFLEATDNSHLRSMPASFLPPSSVKKRGVLLLGDAYNMRHPL | |
| | | | | TGGGMTVAFKDIKLWRKLLKGIPDLYDDAAIFEAKKSFYWARKTS | |
| | | | | HSFVVNILAQALYELFSATDDSLHQLRKACFLYFKLGGECVAGPVG | |
| | | | | LLSVLSPNPLVLIGHFFAVAIYAVYFCFKSEPWITKPRALLSSGAVLY | |
| | | | | KACSVIFPLIYSEMKYMVH* | |
| SQLE | squalene epoxidase | 6713 | 184 | MLEFHFEGEEQPLSMMKKFLKSSWVRIGFVPEEERNVLRRRKGTNI | 152. |
| | [Source:HGNC | | | SETSLIGTAACTSTSSQNDPEVIIVGAGVLGSALAAVLSRDGRKVTVI | |
| | Symbol; Acc:HGNC: | | | ERDLKEPDRIVGEFLQPGGYHVLKDLGLGDTVEGLDAQVVNGYMI | |
| | 11279] | | | HDQESKSEVQIPYPLSENNQVQSGRAFHHGRFIMSLRKAAMAEPK | |
| SQLE | squalene epoxidase | 6713 | 480 | MLRRKGTNISETSLIGTAACTSTSSQNDPEVIIVGAGVLGSALAAVL | 153. |
| | [Source HGNC | | | SRDGRKVTVIERDLKEPDRIVGEFLQPGGYHVLKDLGLGDTVEGLD | |
| | Symbol; Acc:HGNC: | | | AQVVNGYMIHDQESKSEVQIPYPLSENNQVQSGRAFHHGRFIMSLR | |
| | 11279] | | | KAAMAEPNAKFIEGVVLQLLEEDDVVMGVQYKDKETGDIKELHAP | |
| | | | | LTVVADGLFSKFRKSLVSNKVSVSSHFVGFLMKNAPQFKANHAELI | |
| | | | | LANPSPVLIYQISSSETRVLVDIRGEMPRNLREYMVEKIYPQIPDHLK | |
| | | | | EPFLEATDNSHLRSMPASFLPPSSVKKRGVLLLGDAYNMRHPLTGG | |
| | | | | GMTVAFKDIKLWRKLLKGIPDLYDDAAIFEAKKSFYWARKTSHSF | |
| | | | | VVNILAQALYELFSATDDSLHQLRKACFLYFKLGGECVAGPVGLLS | |
| | | | | VLSPNPLVLIGHFFAVAIYAVYFCFKSEPWITKPRALLSSGAVLYKA | |
| | | | | CSVIFPLIYSEMKYMVH* | |
| SQLE | squalene epoxidase | 6713 | 164 | RGEMPRNLREYMVEKIYPQIPDHLKEPFLEATDNSHLRSMPASFLPP | 154. |
| | [Source:HGNC | | | SSVKKRGVLLLGDAYNMRHPLTGGGMTVAFKDIKLWRKLLKGIPD | |
| | Symbol; Acc:HGNC: | | | LYDDAAIFEAKKSFYWARKTSHSFVVNILAQALYELFSATDDSLHQ | |
| | 11279] | | | LRKACFLYFKLGGECVAGPVGLLSV* | |
| ADAM22 | ADAM | 53616 | 907 | MQAAVAVSVPFLLLCVLGTCPPARCGQAGDASLMELEKRKENRFV | 155. |
| | metallopeptidase | | | ERQSIVPLRLIYRSGGEDESRHDALDTRVRGDLGGPQLTHVDQASF | |
| | domain 22 | | | QVDAFGTSFILDVVLNHDLLSSEYIERHIEHGGKTVEVKGGEHCYY | |
| | [Source:HGNC | | | QGHIRGNPDSFVALSTCHGLHGMFYDGNHTYLIEPEENDTTQEDFH | |
| | Symbol; Acc:HGNC: | | | FHSVYKSRLFEFSLDDLPSEFQQVNITPSKFILKPRPKRSKRQLRRYP | |
| | 201] | | | RNVEEETKYIELMIVNDHLMFKKHRLSVVHTNTYAKSVVNMADLI | |
| | | | | YKDQLKTRIVLVAMETWATDNKFAISENPLITLREFMKYRRDFIKE | |
| | | | | KSDAVHLFSGSQFESSRSGAAYIGGICSLLKGGGVNEFGKTDLMAV | |
| | | | | TLAQSLAHNIGIISDKRKLASGECKCEDTWSGCIMGDTGYYLPKKF | |
| | | | | TQCNIEEYHDFLNSGGGACLFNKPSKLLDPPECGNGFIETGEECDCG | |
| | | | | TPAECVLEGAECCKKCTLTQDSQCSDGLCCKKCKFQPMGTVCREA | |
| | | | | VNDCDIRETCSGNSSQCAPNIHKMDGYSCDGVQGICFGGRCKTRDR | |
| | | | | QCKYIWGQKVTASDKYCYEKLNIEGTEKGNCGKDKDTWIQCNKR | |
| | | | | DVLCGYLLCTNIGNIPRLGELDGEITSTLVVQQGRTLNCSGGHVKLE | |
| | | | | EDVDLGYVEDGTPCGPQMMCLEHRCLPVASFNFSTCLSSKEGTICS | |
| | | | | GNGVCSNELKCVCNRHWIGSDCNTYFPHNDDAKTGITLSGNGVAG | |
| | | | | TNIIIGIIAGTILVLALILGITAWGYKNYREQRQLPQGDYVKKPGDGD | |
| | | | | SFYSDIPPGVSTNSASSSKKRSNGLSHSWSERIPDTKHISDICENGRPR | |
| | | | | SNSWQGNLGGNKKKIRGKRFRPRSNSTETLSPAKSPSSSTGSIASSR | |
| | | | | KYPYPMPPLPDEDKKVNRQSARLWETSI* | |
| ADAM22 | ADAM | 53616 | 196 | MQAAVAVSVPFLLLCVLGTCPPARCGQAGDASLMELEKRKENRFV | 156. |
| | metallopeptidase | | | ERQSIVPLRLIYRSGGEDESRHDALDTRVRGDLGGPQIQMFLKSESQ | |
| | domain 22 | | | KTIYQIQLTHVDQASFQVDAFGTSFILDVVLNHDLLSSEYIERHIEHG | |
| | [Source:HGNC | | | GKTVEVKGGEHCYYQGHIRGNPDSFVALSTCHGLHGMFYDGNHT | |
| | Symbol; Acc:HGNC: | | | YLIEPEENDTTQ | |
| | 201] | | | | |
| ADAM22 | ADAM | 53616 | 860 | MQAAVAVSVPFLLLCVLGTCPPARCGQAGDASLMELEKRKENRFV | 157. |
| | metallopeptidase | | | ERQSIVPLRLIYRSGGEDESRHDALDTRVRGDLGGPQLTHVDQASF | |
| | domain 22 | | | QVDAFGTSFILDVVLNHDLLSSEYIERHIEHGGKTVEVKGGEHCYY | |
| | [Source:HGNC | | | QGHIRGNPDSFVALSTCHGLHGMFYDGNHTYLIEPEENDTTQEDFH | |
| | Symbol; Acc:HGNC: | | | FHSVYKSRLFEFSLDDLPSEFQQVNITPSKFILKPRPKRSKRQLRRYP | |
| | 201] | | | RNVEEETKYIELMIVNDHLMFKKHRLSVVHTNTYAKSVVNMADLI | |
| | | | | YKDQLKTRIVLVAMETWATDNKFAISENPLITLREFMKYRRDFIKE | |
| | | | | KSDAVHLFSGSQFESSRSGAAYIGGICSLLKGGGVNEFGKTDLMAV | |
| | | | | TLAQSLAHNIGIISDKRKLASGECKCEDTWSGCIMGDTGYYLPKKF | |
| | | | | TQCNIEEYHDFLNSGGGACLFNKPSKLLDPPECGNGFIETGEECDCG | |
| | | | | TPAECVLEGAECCKKCTLTQDSQCSDGLCCKKCKFQPMGTVCREA | |
| | | | | VNDCDIRETCSGNSSQCAPNIHKMDGYSCDGVQGICFGGRCKTRDR | |
| | | | | QCKYIWGQKVTASDKYCYEKLNIEGTEKGNCGKDKDTWIQCNKR | |
| | | | | DVLCGYLLCTNIGNIPRLGELDGEITSTLVVQQGRTLNCSGGHVKLE | |
| | | | | EDVDLGYVEDGTPCGPQMMCLEHRCLPVASFNFSTCLSSKEGTICS | |
| | | | | GNGVCSNELKCVCNRHWIGSDCNTYFPHNDDAKTGITLSGNGVAG | |
| | | | | TNIIIGIIAGTILVLALILGITAWGYKNYREQRQLPQGDYVKKPGDGD | |
| | | | | SFYSDIPPGVSTNSASSSKKRSNGLSHSWSERIPDTKHISDICENGRPR | |
| | | | | SNSWQGNLGGNKKKIRGKRFRPRSNSTE* | |
| ADAM22 | ADAM | 53616 | 900 | MQAAVAVSVPFLLLCVLGTCPPARCGQAGDASLMELEKRKENRFV | 158. |
| | metallopeptidase | | | ERQSIVPLRLIYRSGGEDESRHDALDTRVRGDLGGPQLTHVDQASF | |
| | domain 22 | | | QVDAFGTSFILDVVLNHDLLSSEYIERHIEHGGKTVEVKGGEHCYY | |
| | [Source:HGNC | | | QGHIRGNPDSFVALSTCHGLHGMFYDGNHTYLIEPEENDTTQEDFH | |
| | Symbol; Acc:HGNC: | | | FHSVYKSRLFEFSLDDLPSEFQQVNITPSKFILKPRPKRSKRQLRRYP | |
| | 201] | | | RNVEEETKYIELMIVNDHLMFKKHRLSVVHTNTYAKSVVNMADLI | |
| | | | | YKDQLKTRIVLVAMETWATDNKFAISENPLITLREFMKYRRDFIKE | |
| | | | | KSDAVHLFSGSQFESSRSGAAYIGGICSLLKGGGVNEFGKTDLMAV | |
| | | | | TLAQSLAHNIGIISDKRKLASGECKCEDTWSGCIMGDTGYYLPKKF | |
| | | | | TQCNIEEYHDFLNSGGGACLFNKPSKLLDPPECGNGFIETGEECDCG | |
| | | | | TPAECVLEGAECCKKCTLTQDSQCSDGLCCKKCKFQPMGTVCREA | |
| | | | | VNDCDIRETCSGNSSQCAPNIHKMDGYSCDGVQGICFGGRCKTRDR | |
| | | | | QCKYIWGQKVTASDKYCYEKLNIEGTEKGNCGKDKDTWIQCNKR | |
| | | | | DVLCGYLLCTNIGNIPRLGELDGEITSTLVVQQGRTLNCSGGHVKLE | |
| | | | | EDVDLGYVEDGTPCGPQMMCLEHRCLPVASFNFSTCLSSKEGTICS | |
| | | | | GNGVCSNELKCVCNRHWIGSDCNTYFPHNDDAKTGITLSGNGVAG | |
| | | | | TNIIIGIIAGTILVLALILGITAWGYKNYREQRSNGLSHSWSERIPDTK | |
| | | | | HISDICENGRPRSNSWQGNLGGNKKKIRGKRFRPRSNSTEYLNPWF | |
| | | | | KRDYNVAKWVEDVNKNTEGPYFRTLSPAKSPSSSTGSIASSRKYPY | |
| | | | | PMPPLPDEDKKVNRQSARLWETSI* | |
| ADAM22 | ADAM | 53616 | 804 | MELEKRKENRFVERQSIVPLRLIYRSGGEDESRHDALDTRVRGDLG | 159. |
| | metallopeptidase | | | GPQLTHVDQASFQVDAFGTSFILDVVLNHDLLSSEYIERHIEHGGKT | |
| | domain 22 | | | VEVKGGEHCYYQGHIRGNPDSFVALSTCHGLHGMFYDGNHTYLIE | |
| | [Source HGNC | | | PEENDTTQEDFHFHSVYKSRLFEFSLDDLPSEFQQVNITPSKFILKPR | |
| | Symbol; Acc:HGNC: | | | PKRSKRQLRRYPRNVEEETKYIELMIVNDHLMFKKHRLSVVHTNTY | |
| | 201] | | | AKSVVNMADLIYKDQLKTRIVLVAMETWATDNKFAISENPLITLRE | |
| | | | | FMKYRRDFIKEKSDAVHLFSGSQFESSRSGAAYIGGICSLLKGGGVN | |
| | | | | EFGKTDLMAVTLAQSLAHNIGIISDKRKLASGECKCEDTWSGCIMG | |
| | | | | DTGYYLPKKFTQCNIEEYHDFLNSGGGACLFNKPSKLLDPPECGNG | |
| | | | | FIETGEECDCGTPAECVLEGAECCKKCTLTQDSQCSDGLCCKKCKF | |
| | | | | QPMGTVCREAVNDCDIRETCSGNSSQCAPNIHKMDGYSCDGVQGI | |
| | | | | CFGGRCKTRDRQCKYIWGQKVTASDKYCYEKLNIEGTEKGNCGKD | |
| | | | | KDTWIQCNKRDVLCGYLLCTNIGNIPRLGELDGEITSTLVVQQGRTL | |
| | | | | NCSGGHVKLEEDVDLGYVEDGTPCGPQMMCLEHRCLPVASFNFST | |
| | | | | CLSSKEGTICSGNGVCSNELKCVCNRHWIGSDCNTYFPHNDDAKTG | |
| | | | | ITLSGNGVAGTNIIIGIIAGTILVLALILGITAWGYKNYREQRQLPQG | |
| | | | | DYVKKPGDGDSFYSDIPPGVSTNSASSSKKRSNGLSHSWSERIPDTK | |
| | | | | HISDICENGRPRSNSWQG | |
| ADAM22 | ADAM | 53616 | 871 | MQAAVAVSVPFLLLCVLGTCPPARCGQAGDASLMELEKRKENRFV | 160. |
| | metallopeptidase | | | ERQSIVPLRLIYRSGGEDESRHDALDTRVRGDLGGPQLTHVDQASF | |
| | domain 22 | | | QVDAFGTSFILDVVLNHDLLSSEYIERHIEHGGKTVEVKGGEHCYY | |
| | [Source HGNC | | | QGHIRGNPDSFVALSTCHGLHGMFYDGNHTYLIEPEENDTTQEDFH | |
| | Symbol; Acc:HGNC: | | | FHSVYKSRLFEFSLDDLPSEFQQVNITPSKFILKPRPKRSKRQLRRYP | |
| | 201] | | | RNVEEETKYIELMIVNDHLMFKKHRLSVVHTNTYAKSVVNMADLI | |
| | | | | YKDQLKTRIVLVAMETWATDNKFAISENPLITLREFMKYRRDFIKE | |
| | | | | KSDAVHLFSGSQFESSRSGAAYIGGICSLLKGGGVNEFGKTDLMAV | |
| | | | | TLAQSLAHNIGIISDKRKLASGECKCEDTWSGCIMGDTGYYLPKKF | |
| | | | | TQCNIEEYHDFLNSGGGACLFNKPSKLLDPPECGNGFIETGEECDCG | |
| | | | | TPAECVLEGAECCKKCTLTQDSQCSDGLCCKKCKFQPMGTVCREA | |
| | | | | VNDCDIRETCSGNSSQCAPNIHKMDGYSCDGVQGICFGGRCKTRDR | |
| | | | | QCKYIWGQKVTASDKYCYEKLNIEGTEKGNCGKDKDTWIQCNKR | |
| | | | | DVLCGYLLCTNIGNIPRLGELDGEITSTLVVQQGRTLNCSGGHVKLE | |
| | | | | EDVDLGYVEDGTPCGPQMMCLEHRCLPVASFNFSTCLSSKEGTICS | |
| | | | | GNGVCSNELKCVCNRHWIGSDCNTYFPHNDDAKTGITLSGNGVAG | |
| | | | | TNIIIGIIAGTILVLALILGITAWGYKNYREQRSNGLSHSWSERIPDTK | |
| | | | | HISDICENGRPRSNSWQGNLGGNKKKIRGKRFRPRSNSTETLSPAKS | |
| | | | | PSSSTGSIASSRKYPYPMPPLPDEDKKVNRQSARLWETSI* | |
| ADAM22 | ADAM | 53616 | 343 | MQAAVAVSVPFLLLCVLGTCPPARCGQAGDASLMELEKRKENRFV | 161. |
| | metallopeptidase | | | ERQSIVPLRLIYRSGGEDESRHDALDTRVRGDLGGPQLTHVDQASF | |
| | domain 22 | | | QVDAFGTSFILDVVLNHDLLSSEYIERHIEHGGKTVEVKGGEHCYY | |
| | [Source HGNC | | | QGHIRGNPDSFVALSTCHGLHGMFYDGNHTYLIEPEENDTTQEDFH | |
| | Symbol; Acc:HGNC: | | | FHSVYKSRLFEFSLDDLPSEFQQVNITPSKFILKPRPKRSKRQLRRYP | |
| | 201] | | | RNVEEETKYIELMIVNDHLMFKKHRLSVVHTNTYAKSVVNMADLI | |
| | | | | YKDQLKTRIVLVAMETWATDNKFAISENPLITLREFMKYRRDFIKE | |
| | | | | KSDAVHLFSYVTSVMMYYFF* | |
| ADAM22 | ADAM | 53616 | 265 | XCNRHWIGSDCNTYFPHNDDAKTGITLSGNGVAGTNIIIGIIAGTILV | 162. |
| | metallopeptidase | | | LALILGITAWGYKNYREQRQLPQGDYVKKPGDGDSFYSDIPPGVST | |
| | domain 22 | | | NSASSSKKRSAFLSHFQISTCSITHYSISQNISLFCSRSNGLSHSWSERI | |
| | [Source HGNC | | | PDTKHISDICENGRPRSNSWQGNLGGNKKKIRGKRFRPRSNSTEYL | |
| | Symbol; Acc:HGNC: | | | NPWFKRDYNVAKWVEDVNKNTEGPYFRTLSPAKSPSSSTGSIASSR | |
| | 201] | | | KYPYPMPPLPDEDKKVNRQSARLWETSI* | |
| ADAM22 | ADAM | 53616 | 331 | EEDVDLGYVEDGTPCGPQMMCLEHRCLPVASFNFSTCLSSKEGTIC | 163. |
| | metallopeptidase | | | SGNGVCSNELKCVCNRHWIGSDCNTYFPHNDDAKTGITLSGNGVA | |
| | domain 22 | | | GTNIIIGIIAGTILVLALILGITAWGYKNYREQRQLPQGDYVKKPGDG | |
| | [Source HGNC | | | DSFYSDIPPGVSTNSASSSKKRSNGLSHSWSERIPDTKHISDICENGR | |
| | Symbol; Acc:HGNC: | | | PRSNSWQGNLGGNKKKIRGKRFRPRSNSTEREPQAPEPGHSLAQTV | |
| | 201] | | | PSQGISPGGSDSPQTGSLDHRYLNPWFKRDYNVAKWVEDVNKNTE | |
| | | | | GPYFRTLSPAKSPSSSTGSIASSRKYPYPMPPLPDEDKKVNRQSARL | |
| | | | | WETSI* | |
| NLRC5 | NLR family CARD | 84166 | 1867 | MDPVGLQLGNKNLWSCLVRLLTKDPEWLNAKMKFFLPNTDLDSR | 164. |
| | domain containing 5 | | | NETLDPEQRVILQLNKLHVQGSDTWQSFIHCVCMQLEVPLDLEVLL | |
| | [Source HGNC | | | LSTFGYDDGFTSQLGAEGKSQPESQLHHGLKRPHQSCGSSPRRKQC | |
| | Symbol; Acc:HGNC: | | | KKQQLELAKKYLQLLRTSAQQRYRSQIPGSGQPHAFHQVYVPPILR | |
| | 29933] | | | RATASLDTPEGAIMGDVKVEDGADVSISDLFNTRVNKGPRVTVLLG | |
| | | | | KAGMGKTTLAHRLCQKWAEGHLNCFQALFLFEFRQLNLITRFLTPS | |
| | | | | ELLFDLYLSPESDHDTVFQYLEKNADQVLLIFDGLDEALQPMGPDG | |
| | | | | PGPVLTLFSHLCNGTLLPGCRVMATSRPGKLPACLPAEAAMVHML | |
| | | | | GFDGPRVEEYVNHFFSAQPSREGALVELQTNGRLRSLCAVPALCQV | |
| | | | | ACLCLHHLLPDHAPGQSVALLPNMTQLYMQMVLALSPPGHLPTSS | |
| | | | | LLDLGEVALRGLETGKVIFYAKDIAPPLIAFGATHSLLTSFCVCTGP | |
| | | | | GHQQTGYAFTHLSLQEFLAALHLMASPKVNKDTLTQYVTLHSRWV | |
| | | | | QRTKARLGLSDHLPTFLAGLASCTCRPFLSHLAQGNEDCVGAKQA | |
| | | | | AVVQVLKKLATRKLTGPKVVELCHCVDETQEPELASLTAQSLPYQ | |
| | | | | LPFHNFPLTCTDLATLTNILEHREAPIHLDFDGCPLEPHCPEALVGCG | |
| | | | | QIENLSFKSRKCGDAFAEALSRSLPTMGRLQMLGLAGSKITARGISH | |
| | | | | LVKALPLCPQLKEVSFRDNQLSDQVVLNIVEVLPHLPRLRKLDLSSN | |
| | | | | SICVSTLLCLARVAVTCPTVRMLQAREADLIFLLSPPTETTAELQRA | |
| | | | | PDLQESDGQRKGAQSRSLTLRLQKCQLQVHDAEALIALLQEGPHLE | |
| | | | | EVDLSGNQLEDEGCRLMAEAASQLHIARKLDLSNNGLSVAGVHCV | |
| | | | | LRAVSACWTLAELHISLQHKTVIFMFAQEPEEQKGPQERAAFLDSL | |
| | | | | MLQMPSELPLSSRRMRLTHCGLQEKHLEQLCKALGGSCHLGHLHL | |
| | | | | DFSGNALGDEGAARLAQLLPGLGALQSLNLSENGLSLDAVLGLVR | |
| | | | | CFSTLQWLFRLDISFESQHILLRGDKTSRDMWATGSLPDFPAAAKFL | |
| | | | | GFRQRCIPRSLCLSECPLEPPSLTRLCATLKDCPGPLELQLSCEFLSD | |
| | | | | QSLETLLDCLPQLPQLSLLQLSQTGLSPKSPFLLANTLSLCPRVKKV | |
| | | | | DLRSLHHATLHFRSNEEEEGVCCGRFTGCSLSQEHVESLCWLLSKC | |
| | | | | KDLSQVDLSANLLGDSGLRCLLECLPQVPISGLLDLSHNSISQESAL | |
| | | | | YLLETLPSCPRVREASVNLGSEQSFRIHFSREDQAGKTLRLSECSFRP | |
| | | | | EHVSRLATGLSKSLQLTELTLTQCCLGQKQLAILLSLVGRPAGLFSL | |
| | | | | RVQEPWADRARVLSLLEVCAQASGSVTEISISETQQQLCVQLEFPRQ | |
| | | | | EENPEAVALRLAHCDLGAHHSLLVGQLMETCARLQQLSLSQVNLC | |
| | | | | EDDDASSLLLQSLLLSLSELKTFRLTSSCVSTEGLAHLASGLGHCHH | |
| | | | | LEELDLSNNQFDEEGTKALMRALEGKWMLKRLDLSHLLLNSSTLA | |
| | | | | LLTHRLSQMTCLQSLRLNRNSIGDVGCCHLSEALRAATSLEELDLS | |
| | | | | HNQIGDAGVQHLATILPGLPELRKIDLSGNSISSAGGVQLAESLVLC | |
| | | | | RRLEELMLGCNALGDPTALGLAQELPQHLRVLHLPFSHLGPGGALS | |
| | | | | LAQALDGSPHLEEISLAENNLAGGVLRFCMELPLLRQIDLVSCKIDN | |
| | | | | QTAKLLTSSFTSCPALEVILLSWNLLGDEAAAELAQVLPQMGRLKR | |
| | | | | VDLEKNQITALGAWLLAEGLAQGSSIQVIRLWNNPIPCDMAQHLKS | |
| | | | | QEPRLDFAFFDNQPQAPWGT* | |
| NLRC5 | NLR family CARD | 84166 | 158 | XLSANLLGDSGLRCLLECLPQVPISGLLDLSHNSISQESALYLLETLP | 165. |
| | domain containing 5 | | | SCPRVREASVNLGSEQSFRIHFSREDQAGKTLRLSECSFRPEHVSRL | |
| | [Source:HGNC | | | ATGLSKSLQLTELTLTQCCLGQKQLAILLSLVGRPAGLFSLRLHKAH | |
| | Symbol; Acc:HGNC: | | | RETVLPHTGGLCFGI* | |
| | 29933] | | | | |
| NLRC5 | NLR family CARD | 84166 | 631 | LTCTDLATLTNILEHREAPIHLDFDGCPLEPHCPEALVGCGQIENLSF | 166. |
| | domain containing 5 | | | KSRKCGDAFAEALSRSLPTMGRLQMLGLSSNSICVSTLLCLARVAV | |
| | [Source:HGNC | | | TCPTVRMLQAREADLIFLLSPPTETTAELQRAPDLQESDGQRKGAQ | |
| | Symbol; Acc:HGNC: | | | SRSLTLRLQKCQLQVHDAEALIALLQEGPHLEEVDLSGNQLEDEGC | |
| | 29933] | | | RLMAEAASQLHIARKLDLSNNGLSVAGVHCVLRAVSACWTLAELH | |
| | | | | ISLQHKTVIFMFAQEPEEQKGPQERAAFLDSLMLQMPSELPLSSRRM | |
| | | | | RLTHCGLQEKHLEQLCKALGGSCHLGHLHLDFSGNALGDEGAARL | |
| | | | | AQLLPGLGALQSLNLSENGLSLDAVLGLVRCFSTLQWLFRLDISFES | |
| | | | | QHILLRGDKTSSLSECPLEPPSLTRLCATLKDCPGPLELQLSCEFLSD | |
| | | | | QSLETLLDCLPQLPQLSLLQLSQTGLSPKSPFLLANTLSLCPRVKKV | |
| | | | | DLRSLHHATLHFRSNEEEEGVCCGRFTGCSLSQEHVESLCWLLSKC | |
| | | | | KDLSQVDLGSEQSFRIHFSREDQAGKTLRLSECSFRPEHVSRLATGL | |
| | | | | SKSLQLTELTLTQCCLGQKQLAILLSLVGRPAGLFSLRDSTRHTEKL | |
| | | | | SFPTLEACALGFKKKRKKERKKVSED | |
| NLRC5 | NLR family CARD | 84166 | 388 | XELPLSSRRMRLTHCGLQEKHLEQLCKALGGSCHLGHLHLDFSGN | 167. |
| | domain containing 5 | | | ALGDEGAARLAQLLPGLGALQSLNLSENGLSLDAVLGLVRCFSTLQ | |
| | [Source:HGNC | | | WLFRLDISFESQHILLRGDKTSRDMWATGSLPDFPAAAKFLGFRQR | |
| | Symbol; Acc:HGNC: | | | CIPRSLCLSECPLEPPSLTRLCATLKDCPGPLELQLSCEFLSDQSLETL | |
| | 92933] | | | LDCLPQLPQLSLLQLSQTGLSPKSPFLLANTLSLCPRVKKVDLRSLH | |
| | | | | HATLHFRSNEEEEGVCCGLSANLLGDSGLRCLLECLPQVPISGLLDL | |
| | | | | SHNSISQESALYLLETLPSCPRVREASVNLGSEQSFRIHFSREDQAGK | |
| | | | | TLRLSECSFRPEHVSRLATGLSKSLQLTELTLTQCCLGQKQLAILLSL | |
| | | | | VGRPAGLFSLS* | |
| NLRC5 | NLR family CARD | 84166 | 1838 | MDPVGLQLGNKNLWSCLVRLLTKDPEWLNAKMKFFLPNTDLDSR | 168. |
| | domain containing 5 | | | NETLDPEQRVILQLNKLHVQGSDTWQSFIHCVCMQLEVPLDLEVLL | |
| | [Source:HGNC | | | LSTFGYDDGFTSQLGAEGKSQPESQLHHGLKRPHQSCGSSPRRKQC | |
| | Symbol; Acc:HGNC: | | | KKQQLELAKKYLQLLRTSAQQRYRSQIPGSGQPHAFHQVYVPPILR | |
| | 29933] | | | RATASLDTPEGAIMGDVKVEDGADVSISDLFNTRVNKGPRVTVLLG | |
| | | | | KAGMGKTTLAHRLCQKWAEGHLNCFQALFLFEFRQLNLITRFLTPS | |
| | | | | ELLFDLYLSPESDHDTVFQYLEKNADQVLLIFDGLDEALQPMGPDG | |
| | | | | PGPVLTLFSHLCNGTLLPGCRVMATSRPGKLPACLPAEAAMVHML | |
| | | | | GFDGPRVEEYVNHFFSAQPSREGALVELQTNGRLRSLCAVPALCQV | |
| | | | | ACLCLHHLLPDHAPGQSVALLPNMTQLYMQMVLALSPPGHLPTSS | |
| | | | | LLDLGEVALRGLETGKVIFYAKDIAPPLIAFGATHSLLTSFCVCTGP | |
| | | | | GHQQTGYAFTHLSLQEFLAALHLMASPKVNKDTLTQYVTLHSRWV | |
| | | | | QRTKARLGLSDHLPTFLAGLASCTCRPFLSHLAQGNEDCVGAKQA | |
| | | | | AVVQVLKKLATRKLTGPKVVELCHCVDETQEPELASLTAQSLPYQ | |
| | | | | LPFHNFPLTCTDLATLTNILEHREAPIHLDFDGCPLEPHCPEALVGCG | |
| | | | | QIENLSFKSRKCGDAFAEALSRSLPTMGRLQMLGLAGSKITARGISH | |
| | | | | LVKALPLCPQLKEVSFRDNQLSDQVVLNIVEVLPHLPRLRKLDLSSN | |
| | | | | SICVSTLLCLARVAVTCPTVRMLQAREADLIFLLSPPTETTAELQRA | |
| | | | | PDLQESDGQRKGAQSRSLTLRLQKCQLQVHDAEALIALLQEGPHLE | |
| | | | | EVDLSGNQLEDEGCRLMAEAASQLHIARKLDLSNNGLSVAGVHCV | |
| | | | | LRAVSACWTLAELHISLQHKTVIFMFAQEPEEQKGPQERAAFLDSL | |
| | | | | MLQMPSELPLSSRRMRLTHCGLQEKHLEQLCKALGGSCHLGHLHL | |
| | | | | DFSGNALGDEGAARLAQLLPGLGALQSLNLSENGLSLDAVLGLVR | |
| | | | | CFSTLQWLFRLDISFESQHILLRGDKTSRDMWATGSLPDFPAAAKFL | |
| | | | | GFRQRCIPRSLCLSECPLEPPSLTRLCATLKDCPGPLELQLSCEFLSD | |
| | | | | QSLETLLDCLPQLPQLSLLQLSQTGLSPKSPFLLANTLSLCPRVKKV | |
| | | | | DLRSLHHATLHFRSNEEEEGVCCGLSANLLGDSGLRCLLECLPQVPI | |
| | | | | SGLLDLSHNSISQESALYLLETLPSCPRVREASVNLGSEQSFRIHFSR | |
| | | | | EDQAGKTLRLSECSFRPEHVSRLATGLSKSLQLTELTLTQCCLGQK | |
| | | | | QLAILLSLVGRPAGLFSLRVQEPWADRARVLSLLEVCAQASGSVTEI | |
| | | | | SISETQQQLCVQLEFPRQEENPEAVALRLAHCDLGAHHSLLVGQLM | |
| | | | | ETCARLQQLSLSQVNLCEDDDASSLLLQSLLLSLSELKTFRLTSSCV | |
| | | | | STEGLAHLASGLGHCHHLEELDLSNNQFDEEGTKALMRALEGKW | |
| | | | | MLKRLDLSHLLLNSSTLALLTHRLSQMTCLQSLRLNRNSIGDVGCC | |
| | | | | HLSEALRAATSLEELDLSHNQIGDAGVQHLATILPGLPELRKIDLSG | |
| | | | | NSISSAGGVQLAESLVLCRRLEELMLGCNALGDPTALGLAQELPQH | |
| | | | | LRVLHLPFSHLGPGGALSLAQALDGSPHLEEISLAENNLAGGVLRFC | |
| | | | | MELPLLRQIDLVSCKIDNQTAKLLTSSFTSCPALEVILLSWNLLGDE | |
| | | | | AAAELAQVLPQMGRLKRVDLEKNQITALGAWLLAEGLAQGSSIQV | |
| | | | | IRLWNNPIPCDMAQHLKSQEPRLDFAFFDNQPQAPWGT* | |
| NLRC5 | NLR family CARD | 84166 | 1058 | XSELLFDLYLSPESDHDTVFQYLEKNADQVLLIFDGLDEALQPMGP | 169. |
| | domain containing 5 | | | DGPGPVLTLFSHLCNGTLLPGCRVMATSRPGKLPACLPAEAAMVH | |
| | [Source:HGNC | | | MLGFDGPRVEEYVNHFFSAQPSREGALVELQTNGRLRSLCAVPALC | |
| | Symbol; Acc:HGNC: | | | QVACLCLHHLLPDHAPGQSVALLPNMTQLYMQMVLALSPPGHLPT | |
| | 29933] | | | SSLLDLGEVALRGLETGKVIFYAKDIAPPLIAFGATHSLLTSFCVCTG | |
| | | | | PGHQQTGYAFTHLSLQEFLAALHLMASPKVNKDTLTQYVTLHSRW | |
| | | | | VQRTKARLGLSDHLPTFLAGLASCTCRPFLSHLAQGNEDCVGAKQ | |
| | | | | AAVVQVLKKLATRKLTGPKVVELCHCVDETQEPELASLTAQSLPY | |
| | | | | QLPFHNFPLTCTDLATLTNILEHREAPIHLDFDGCPLEPHCPEALVGC | |
| | | | | GQIENLSFKSRKCGDAFAEALSRSLPTMGRLQMLGLAGSKITARGIS | |
| | | | | HLVKALPLCPQLKEVSFRDNQLSDQVVLNIVEVLPHLPRLRKLDLSS | |
| | | | | NSICVSTLLCLARVAVTCPTVRMLQAREADLIFLLSPPTETTAELQR | |
| | | | | APDLQESDGQRKGAQSRSLTLRLQKCQLQVHDAEALIALLQEGPHL | |
| | | | | EEVDLSGNQLEDEGCRLMAEAASQLHIARKLDLSNNGLSVAGVHC | |
| | | | | VLRAVSACWTLAELHISLQHKTVIFMFAQEPEEQKGPQERAAFLDS | |
| | | | | LMLQMPSELPLSSRRMRLTHCGLQEKHLEQLCKALGGSCHLGHLH | |
| | | | | LDFSGNALGDEGAARLAQLLPGLGALQSLNLSENGLSLDAVLGLV | |
| | | | | RCFSTLQWLFRLDISFESQHILLRGDKTSRDMWATGSLPDFPAAAKF | |
| | | | | LGFRQRCIPRSLCLSECPLEPPSLTRLCATLKDCPGPLELQLSCEFLSD | |
| | | | | QSLETLLDCLPQLPQLSLLQLSQTGLSPKSPFLLANTLSLCPRVKKV | |
| | | | | DLRSLHHATLHFRSNEEEEGVCCGRFTGCSLSQEHVESLCWLLSKC | |
| | | | | KDLSQVDLSANLLGDSGLRCLLECLPQVPISGLLDLSHNSISQESAL | |
| | | | | YLLETLPSCPRVREASVKCLGSWHVWAPCFPRPFSLQPGL* | |
| NLRC5 | NLR family CARD | 84166 | 74 | MDPVGLQLGNKNLWSCLVRLLTKDPEWLNAKMKFFLPNTDLDSR | 170. |
| | domain containing 5 | | | NETLDPEQRVILQLNKLHVQGSDTWQSFIH | |
| | [Source:HGNC | | | | |
| | Symbol; Acc:HGNC: | | | | |
| | 29933] | | | | |
| NLRC5 | NLR family CARD | 84166 | 111 | XASGLGHCHHLEELDLSNNQFDEEGTKALMRALEGKWMLKRLDL | 171. |
| | domain containing 5 | | | SHLLLNSSTLALLTHRLSQMTCLQSLSLTLSPRLECSGMISLHCNLCL | |
| | [Source:HGNC | | | LGSSDSGASAAQVAGITD* | |
| | Symbol; Acc:HGNC: | | | | |
| | 29933] | | | | |
| NLRC5 | NLR family CARD | 84166 | 703 | QKCQLQVHDAEALIALLQEGPHLEEVDLSGNQLEDEGCRLMAEAA | 172. |
| | domain containing 5 | | | SQLHIARKLDLSNNGLSVAGVHCVLRAVSACWTLAELHISLQHKTV | |
| | [Source:HGNC | | | IFMFAQEPEEQKGPQERAAFLDSLMLQMPSELPLSSRRMRLTHCGL | |
| | Symbol; Acc:HGNC: | | | QEKHLEQLCKALGGSCHLGHLHLDFSGNALGDEGAARLAQLLPGL | |
| | 29933] | | | GALQSLNLSENGLSLDAVLGLVRCFSTLQWLFRLDISFESQHILLRG | |
| | | | | DKTSRDMWATGSLPDFPAAAKFLGFRQRCIPRSLCLSECPLEPPSLT | |
| | | | | RLCATLKDCPGPLELQLSCEFLSDQSLETLLDCLPQLPQLSLLQLSQT | |
| | | | | GLSPKSPFLLANTLSLCPRVKKVDLRSLHHATLHFRSNEEEEGVCCG | |
| | | | | RFTGCSLSQEHVESLCWLLSKCKDLSQVDLSANLLGDSGLRCLLEC | |
| | | | | LPQVPISGLLDLSHNSISQESALYLLETLPSCPRVREASVNLGSEQSF | |
| | | | | RIHFSREDQAGKTLRLSECSFRPEHVSRLATGLSKSLQLTELTLTQC | |
| | | | | CLGQKQLAILLSLVGRPAGLFSLRVQEPWADRARVLSLLEVCAQAS | |
| | | | | GSVTEISISETQQQLCVQLEFPRQEENPEAVALRLAHCDLGAHHSLL | |
| | | | | VGQLMETCARLQQLSLSQVNLCEDDDASSLLLQSLLLSLSELKTFRI | |
| | | | | QSSQDPGRLLPDLLPFDPHQADLQLCEHRGPRPPGIWSGPLPPLGGA | |
| | | | | GLV* | |
| NLRC5 | NLR family CARD | 84166 | 1181 | XHLNCFQALFLFEFRQLNLITRFLTPSELLFDLYLSPESDHDTVFQYL | 173. |
| | domain containing 5 | | | EKNADQVLLIFDGLDEALQPMGPDGPGPVLTLFSHLCNGTLLPGCR | |
| | [Source:HGNC | | | VMATSRPGKLPACLPAEAAMVHMLGFDGPRVEEYVNHFFSAQPSR | |
| | Symbol; Acc:HGNC: | | | EGALVELQTNGRLRSLCAVPALCQVACLCLHHLLPDHAPGQSVAL | |
| | 29933] | | | LPNMTQLYMQMVLALSPPGHLPTSSLLDLGEVALRGLETGKVIFYA | |
| | | | | KDIAPPLIAFGATHSLLTSFCVCTGPGHQQTGYAFTHLSLQEFLAAL | |
| | | | | HLMASPKVNKDTLTQYVTLHSRWVQRTKARLGLSDHLPTFLAGLA | |
| | | | | SCTCRPFLSHLAQGNEDCVGAKQAAVVQVLKKLATRKLTGPKVVE | |
| | | | | LCHCVDETQEPELASLTAQSLPYQLPFHNFPLTCTDLATLTNILEHR | |
| | | | | EAPIHLDFDGCPLEPHCPEALVGCGQIENLSFKSRKCGDAFAEALSR | |
| | | | | SLPTMGRLQMLGLAGSKITARGISHLVKALPLCPQLKEVSFRDNQL | |
| | | | | SDQVVLNIVEVLPHLPRLRKLDLSSNSICVSTLLCLARVAVTCPTVR | |
| | | | | MLQAREADLIFLLSPPTETTAELQRAPDLQESDGQRKGAQSRSLTLR | |
| | | | | LQKCQLQVHDAEALIALLQEGPHLEEVDLSGNQLEDEGCRLMAEA | |
| | | | | ASQLHIARKLDLSNNGLSVAGVHCVLRAVSACWTLAELHISLQHKT | |
| | | | | VIFMFAQEPEEQKGPQERAAFLDSLMLQMPSELPLSSRRMRLTHCG | |
| | | | | LQEKHLEQLCKALGGSCHLGHLHLDFSGNALGDEGAARLAQLLPG | |
| | | | | LGALQSLNLSENGLSLDAVLGLVRCFSTLQWLFRLDISFESQHILLR | |
| | | | | GDKTSRDMWATGSLPDFPAAAKFLGFRQRCIPRSLCLSECPLEPPSL | |
| | | | | TRLCATLKDCPGPLELQLSCEFLSDQSLETLLDCLPQLPQLSLLQLSQ | |
| | | | | TGLSPKSPFLLANTLSLCPRVKKVDLRSLHHATLHFRSNEEEEGVCC | |
| | | | | GFTGCSLSQEHVESLCWLLSKCKDLSQVDLSANLLGDSGLRCLLEC | |
| | | | | LPQVPISGLLDLSHNSISQESALYLLETLPSCPRVREASVNLGSEQSF | |
| | | | | RIHFSREDQAGKTLRLSECSFRPEHVSRLATGLSKSLQLTELTLTQC | |
| | | | | CLGQKQLAILLSLVGRPAGLFSLRDSTRHTEKLSFPTLEACALGFKK | |
| | | | | KRKKERKKVSEDTELRTKIN* | |
| NLRC5 | NLR family CARD | 84166 | 885 | LTSFCVCTGPGHQQTGYAFTHLSLQEFLAALHLMASPKVNKDTLTQ | 174. |
| | domain containing 5 | | | YVTLHSRWVQRTKARLGLSDHLPTFLAGLASCTCRPFLSHLAQGNE | |
| | [Source:HGNC | | | DCVGAKQAAVVQVLKKLATRKLTGPKVVELCHCVDETQEPELASL | |
| | Symbol; Acc:HGNC: | | | TAQSLPYQLPFHNFPLTCTDLATLTNILEHREAPIHLDFDGCPLEPHC | |
| | 29933] | | | PEALVGCGQIENLSFKSRKCGDAFAEALSRSLPTMGRLQMLGLAGS | |
| | | | | KITARGISHLVKALPLCPQLKEVSFRDNQLSDQVVLNIVEVLPHLPR | |
| | | | | LRKLDLSSNSICVSTLLCLARVAVTCPTVRMLQAREADLIFLLSPPTE | |
| | | | | TTAELQRAPDLQESDGQRKGAQSRSLTLRLQKCQLQVHDAEALIAL | |
| | | | | LQEGPHLEEVDLSGNQLEDEGCRLMAEAASQLHIARKLDLSNNGLS | |
| | | | | VAGVHCVLRAVSACWTLAELHISLQHKTVIFMFAQEPEEQKGPQER | |
| | | | | AAFLDSLMLQMPSELPLSSRRMRLTHCGLQEKHLEQLCKALGGSC | |
| | | | | HLGHLHLDFSGNALGDEGAARLAQLLPGLGALQSLNLSENGLSLD | |
| | | | | AVLGLVRCFSTLQWLFRLDISFESQHILLRGDKTSSLSECPLEPPSLT | |
| | | | | RLCATLKDCPGPLELQLSCEFLSDQSLETLLDCLPQLPQLSLLQLSQT | |
| | | | | GLSPKSPFLLANTLSLCPRVKKVDLRSLHHATLHFRSNEEEEGVCCG | |
| | | | | FTGCSLSQEHVESLCWLLSKCKDLSQVDLSANLLGDSGLRCLLECL | |
| | | | | PQVPISGLLDLSHNSISQESALYLLETLPSCPRVREASVNLGSEQSFRI | |
| | | | | HFSREDQAGKTLRLSECSFRPEHVSRLATGLSKSLQLTELTLTQCCL | |
| | | | | GQKQLAILLSLVGRPAGLFSLRDSTRHTEKLSFPTLEACALGFKKK | |
| NLRC5 | NLR family CARD | 84166 | 326 | XWLFRLDISFESQHILLRGDKTSRDMWATGSLPDFPAAAKFLGFRQ | 175. |
| | domain containing 5 | | | RCIPRSLCLSECPLEPPSLTRLCATLKDCPGPLELQLSCEFLSDQSLET | |
| | [Source:HGNC | | | LLDCLPQLPQLSLLQLSQTGLSPKSPFLLANTLSLCPRVKKVDLRSL | |
| | Symbol; Acc:HGNC: | | | HHATLHFRSNEEEEGVCCGFTGCSLSQEHVESLCWLLSKCKDLSQV | |
| | 29933] | | | DLSANLLGDSGLRCLLECLPQVPISGLLDLSHNSISQESALYLLETLP | |
| | | | | SCPRVREASVNLGSEQSFRIHFSREDQAGKTLRLSECSFRPEHVSRL | |
| | | | | ATGLSKSLQLTELTLTQCCLGQKQLAILLSLVGRPAGLFSLS* | |
| NLRC5 | NLR family CARD | 84166 | 721 | MDPVGLQLGNKNLWSCLVRLLTKDPEWLNAKMKFFLPNTDLDSR | 176. |
| | domain containing 5 | | | NETLDPEQRVILQLNKLHVQGSDTWQSFIHCVCMQLEVPLDLEVLL | |
| | [Source:HGNC | | | LSTFGYDDGFTSQLGAEGKSQPESQLHHGLKRPHQSCGSSPRRKQC | |
| | Symbol; Acc:HGNC: | | | KKQQLELAKKYLQLLRTSAQQRYRSQIPGSGQPHAFHQVYVPPILR | |
| | 29933] | | | RATASLDTPEGAIMGDVKVEDGADVSISDLFNTRVNKGPRVTVLLG | |
| | | | | KAGMGKTTLAHRLCQKWAEGHLNCFQALFLFEFRQLNLITRFLTPS | |
| | | | | ELLFDLYLSPESDHDTVFQYLEKNADQVLLIFDGLDEALQPMGPDG | |
| | | | | PGPVLTLFSHLCNGTLLPGCRVMATSRPGKLPACLPAEAAMVHML | |
| | | | | GFDGPRVEEYVNHFFSAQPSREGALVELQTNGRLRSLCAVPALCQV | |
| | | | | ACLCLHHLLPDHAPGQSVALLPNMTQLYMQMVLALSPPGHLPTSS | |
| | | | | LLDLGEVALRGLETGKVIFYAKDIAPPLIAFGATHSLLTSFCVCTGP | |
| | | | | GHQQTGYAFTHLSLQEFLAALHLMASPKVNKDTLTQYVTLHSRWV | |
| | | | | QRTKARLGLSDHLPTFLAGLASCTCRPFLSHLAQGNEDCVGAKQA | |
| | | | | AVVQVLKKLATRKLTGPKVVELCHCVDETQEPELASLTAQSLPYQ | |
| | | | | LPFHNFPLTCTDLATLTNILEHREAPIHLDFDGCPLEPHCPEALVGCG | |
| | | | | QIENLSFKSRKCGDAFAEALSRSLPTMGRLQMLG* | |
| NLRC5 | NLR family CARD | 84166 | 19 | MDPVGLQLGNKNLWSCLVR | 177. |
| | domain containing 5 | | | | |
| | [Source:HGNC | | | | |
| | Symbol; Acc:HGNC: | | | | |
| | 29933] | | | | |
| IRF1 | interferon regulatory | 3659 | 326 | MPITRMRMRPWLEMQINSNQIPGLIWINKEEMIFQIPWKHAAKHGW | 178. |
| | factor 1 [Source:HGNC | | | DINKDACLFRSWAIHTGRYKAGEKEPDPKTWKANFRCAMNSLPDI | |
| | Symbol; Acc:HGNC: | | | EEVKDQSRNKGSSAVRVYRMLPPLTKNQRKERKSKSSRDAKSKAK | |
| | 6116] | | | RKSCGDSSPDTFSDGLSSSTLPDDHSSYTVPGYMQDLEVEQALTPA | |
| | | | | LSPCAVSSTLPDWHIPVEVVPDSTSDLYNFQVSPMPSTSEATTDEDE | |
| | | | | EGKLPEDIMKLLEQSEWQPTNVDGKGYLLNEPGVQPTSVYGDFSC | |
| | | | | KEEPEIDSPGGDIGLSLQRVFTDLKNMDATWLDSLLTPVRLPSIQAIP | |
| | | | | CAP* | |
| IRF1 | interferon regulatory | 3659 | 192 | MPITRMRMRPWLEMQINSNQIPGLIWINKEEMIFQIPWKHAAKHGW | 179. |
| | factor 1 [Source:HGNC | | | DINKDACLFRSWAIHTGRYKAGEKEPDPKTWKANFRCAMNSLPDI | |
| | Symbol; Acc:HGNC: | | | EEVKDQSRNKGSSAVRVYRMLPPLTKNQRKERKSKSSRDAKSKAK | |
| | 6116] | | | RKSCGDSSPDTFSDGLSSSTLPDDHSSYTVPGYMQDLEVEQALTPA | |
| | | | | LSPCAVSSTL | |
| IRF1 | interferon regulatory | 3659 | 198 | MPITRMRMRPWLEMQINSNQIPGLIWINKEEMIFQIPWKHAAKHGW | 180. |
| | factor 1 [Source:HGNC | | | DINKDACLFRSWAIHTGRYKAGEKEPDPKTWKANFRCAMNSLPDI | |
| | Symbol; Acc:HGNC: | | | EEVKDQSRNKGSSAVRVYRMLPPLTKNQRKERKSKSSRDAKSKAK | |
| | 1616] | | | RKSCGDSSPDTFSDGLSSSTLPDDHSSYTVPGYMQDLEVEQALTPA | |
| | | | | TTDEDEEGKLPEDIMK | |
| IRF1 | interferon regulatory | 3659 | 52 | MPITRMRMRPWLEMQINSNQIPGLIWINKADTKQGKRSQIPRRGRP | 181. |
| | factor 1 [Source:HGNC | | | TFAVP* | |
| | Symbol; Acc:HGNC: | | | | |
| | 6116] | | | | |
| IRF1 | interferon regulatory | 3659 | 118 | MPITRMRMRPWLEMQINSNQIPGLIWINKEEMIFQIPWKHAAKHGW | 182. |
| | factor 1 [Source:HGNC | | | DINKDACLFRSWAIHTGRYKAGEKEPDPKTWKANFRCAMNSLPDI | |
| | Symbol; Acc:HGNC: | | | EEVKDQSRNKGSSAVRVYRMLPPLTKN | |
| | 6116] | | | | |
| IRF1 | interferon regulatory | 3659 | 202 | MPITRMRMRPWLEMQINSNQIPGLIWINKEEMIFQIPWKHAAKHGW | 183. |
| | factor 1 [Source:HGNC | | | DINKDACLFRSWAIHTGRYKAGEKEPDPKTWKANFRCAMNSLPDI | |
| | Symbol; Acc:HGNC: | | | EEVKDQSRNKGSSAVRVYRMLPPLTKNQRKERKSKSSRDAKSKAK | |
| | 6116] | | | RKSCGDSSPDTFSDGLSSSTLPDDHSSYTVPGYMQDLEVEQALTPA | |
| | | | | LGAVGVAANKRGWEGVPTQ* | |
| LRBA | LPS responsive beige- | 987 | 2864 | MASEDNRVPSPPPTGDDGGGGGREETPTEGGALSLKPGLPIRGIRM | 184. |
| | like anchor protein | | | KFAVLTGLVEVGEVSNRDIVETVFNLLVGGQFDLEMNFIIQEGESIN | |
| | [Source:HGNC | | | CMVDLLEKCDITCQAEVWSMFTAILKKSIRNLQVCTEVGLVEKVLG | |
| | Symbol; Acc:HGNC: | | | KIEKVDNMIADLLVDMLGVLASYNLTVRELKLFFSKLQGDKGRWP | |
| | 1742] | | | PHAGKLLSVLKHMPQKYGPDAFFNFPGKSAAAIALPPIAKWPYQNG | |
| | | | | FTFHTWLRMDPVNNINVDKDKPYLYCFRTSKGLGYSAHFVGGCLI | |
| | | | | VTSIKSKGKGFQHCVKFDFKPQKWYMVTIVHIYNRWKNSELRCYV | |
| | | | | NGELASYGEITWFVNTSDTFDKCFLGSSETADANRVFCGQMTAVY | |
| | | | | LFSEALNAAQIFAIYQLGLGYKGTFKFKAESDLFLAEHHKLLLYDG | |
| | | | | KLSSAIAFTYNPRATDAQLCLESSPKDNPSIFVHSPHALMLQDVKAV | |
| | | | | LTHSIQSAMHSIGGVQVLFPLFAQLDYRQYLSDEIDLTICSTLLAFIM | |
| | | | | ELLKNSIAMQEQMLACKGFLVIGYSLEKSSKSHVSRAVLELCLAFS | |
| | | | | KYLSNLQNGMPLLKQLCDHVLLNPAIWIHTPAKVQLMLYTYLSTEF | |
| | | | | IGTVNIYNTIRRVGTVLLIMHTLKYYYWAVNPQDRSGITPKGLDGP | |
| | | | | RPNQKEMLSLRAFLLMFIKQLVMKDSGVKEDELQAILNYLLTMHE | |
| | | | | DDNLMDVLQLLVALMSEHPNSMIPAFDQRNGLRVIYKLLASKSEGI | |
| | | | | RVQALKAMGYFLKHLAPKRKAEVMLGHGLFSLLAERLMLQTNLIT | |
| | | | | MTTYNVLFEILIEQIGTQVIHKQHPDPDSSVKIQNPQILKVIATLLRNS | |
| | | | | PQCPESMEVRRAFLSDMIKLFNNSRENRRSLLQCSVWQEWMLSLC | |
| | | | | YFNPKNSDEQKITEMVYAIFRILLYHAVKYEWGGWRVWVDTLSIT | |
| | | | | HSKVTFEIHKENLANIFREQQGKVDEEIGLCSSTSVQAASGIRRDINV | |
| | | | | SVGSQQPDTKDSPVCPHFTTNGNENSSIEKTSSLESASNIELQTTNTS | |
| | | | | YEEMKAEQENQELPDEGTLEETLTNETRNADDLEVSSDIIEAVAISS | |
| | | | | NSFITTGKDSMTVSEVTASISSPSEEDASEMPEFLDKSIVEEEEDDDY | |
| | | | | VELKVEGSPTEEANLPTELQDNSLSPAASEAGEKLDMFGNDDKLIF | |
| | | | | QEGKPVTEKQTDTETQDSKDSGIQTMTASGSSAMSPETTVSQIAVES | |
| | | | | DLGQMLEEGKKATNLTRETKLINDCHGSVSEASSEQKIAKLDVSNV | |
| | | | | ATDTERLELKASPNVEAPQPHRHVLEISRQHEQPGQGIAPDAVNGQ | |
| | | | | RRDSRSTVFRIPEFNWSQMHQRLLTDLLFSIETDIQMWRSHSTKTV | |
| | | | | MDFVNSSDNVIFVHNTIHLISQVMDNMVMACGGILPLLSAATSATH | |
| | | | | ELENIEPTQGLSIEASVTFLQRLISLVDVLIFASSLGFTEIEAEKSMSSG | |
| | | | | GILRQCLRLVCAVAVRNCLECQQHSQLKTRGDKALKPMHSLIPLGK | |
| | | | | SAAKSPVDIVTGGISPVRDLDRLLQDMDINRLRAVVFRDIEDSKQA | |
| | | | | QFLALAVVYFISVLMVSKYRDILEPQNERHSQSCTETGSENENVSLS | |
| | | | | EITPAAFSTLTTASVEESESTSSARRRDSGIGEETATGLGSHVEVTPH | |
| | | | | TAPPGVSAGPDAISEVLSTLSLEVNKSPETKNDRGNDLDTKATPSVS | |
| | | | | VSKNVNVKDILRSLVNIPADGVTVDPALLPPACLGALGDLSVEQPV | |
| | | | | QFRSFDRSVIVAAKKSAVSPSTFNTSIPTNAVSVVSSVDSAQASDMG | |
| | | | | GESPGSRSSNAKLPSVPTVDSVSQDPVSNMSITERLEHALEKAAPLL | |
| | | | | REIFVDFAPFLSRTLLGSHGQELLIEGTSLVCMKSSSSVVELVMLLCS | |
| | | | | QEWQNSIQKNAGLAFIELVNEGRLLSQTMKDHLVRVANEAEFILSR | |
| | | | | QRAEDIHRHAEFESLCAQYSADKREDEKMCDHLIRAAKYRDHVTA | |
| | | | | TQLIQKIINILTDKHGAWGNSAVSRPLEFWRLDYWEDDLRRRRRFV | |
| | | | | RNPLGSTHPEATLKTAVEHVCIFKLRENSKATDEDILAKGKQSIRSQ | |
| | | | | ALGNQNSENEILLEGDDDTLSSVDEKDLENLAGPVSLSTPAQLVAPS | |
| | | | | VVVKGTLSVTSSELYFEVDEEDPNFKKIDPKILAYTEGLHGKWLFTE | |
| | | | | IRSIFSRRYLLQNTALEIFMANRVAVMFNFPDPATVKKVVNYLPRV | |
| | | | | GVGTSFGLPQTRRISLASPRQLFKASNMTQRWQHREISNFEYLMFL | |
| | | | | NTIAGRSYNDLNQYPVFPWVITNYESEELDLTLPTNFRDLSKPIGAL | |
| | | | | NPKRAAFFAERYESWEDDQVPKFHYGTHYSTASFVLAWLLRIEPFT | |
| | | | | TYFLNLQGGKFDHADRTFSSISRAWRNSQRDTSDIKELIPEFYYLPE | |
| | | | | MFVNFNNYNLGVMDDGTVVSDVELPPWAKTSEEFVHINRLALESE | |
| | | | | FVSCQLHQWIDLIFGYKQQGPEAVRALNVFYYLTYEGAVNLNSITD | |
| | | | | PVLREAVEAQIRSFGQTPSQLLIEPHPPRGSAMQVSPLMFTDKAQQD | |
| | | | | VIMVLKFPSNSPVTHVAANTQPGLATPAVITVTANRLFAVNKWHN | |
| | | | | LPAHQGAVQDQPYQLPVEIDPLIASNTGMHRRQITDLLDQSIQVHSQ | |
| | | | | CFVITSDNRYILVCGFWDKSFRVYSTDTGRLIQVVFGHWDVVTCLA | |
| | | | | RSESYIGGNCYILSGSRDATLLLWYWNGKCSGIGDNPGSETAAPRAI | |
| | | | | LTGHDYEVTCAAVCAELGLVLSGSQEGPCLIHSMNGDLLRTLEGPE | |
| | | | | NCLKPKLIQASREGHCVIFYENGLFCTFSVNGKLQATMETDDNIRAI | |
| | | | | QLSRDGQYLLTGGDRGVVVVRQVSDLKQLFAYPGCDAGIRAMALS | |
| | | | | YDQRCIISGMASGSIVLFYNDFNRWHHEYQTRY* | |
| LRBA | LPS responsive beige- | 987 | 135 | GFTEIEAEKSMSSGGILRQCLRLVCAVAVRNCLECQQHSQLKTRGD | 185. |
| | like anchor protein | | | KALKPMHSLIPLGKSAAKSPVDIVTGGISPVRDLDRLLQDMDINRLR | |
| | [Source:HGNC | | | AVVFRDITKKSLHMNLQNIIDFVRSRITNMSKNCIKWICSN* | |
| | Symbol; Acc:HGNC: | | | | |
| | 4172] | | | | |
| LRBA | LPS responsive beige- | 987 | 2576 | MASEDNRVPSPPPTGDDGGGGGREETPTEGGALSLKPGLPIRGIRM | 186. |
| | like anchor protein | | | KFAVLTGLVEVGEVSNRDIVETVFNLLVGGQFDLEMNFIIQEGESIN | |
| | [Source:HGNC | | | CMVDLLEKCDITCQAEVWSMFTAILKKSIRNLQVCTEVGLVEKVLG | |
| | Symbol; Acc:HGNC: | | | KIEKVDNMIADLLVDMLGVLASYNLTVRELKLFFSKLQGDKGRWP | |
| | 1742] | | | PHAGKLLSVLKHMPQKYGPDAFFNFPGKSAAAIALPPIAKWPYQNG | |
| | | | | FTFHTWLRMDPVNNINVDKDKPYLYCFRTSKGLGYSAHFVGGCLI | |
| | | | | VTSIKSKGKGFQHCVKFDFKPQKWYMVTIVHIYNRWKNSELRCYV | |
| | | | | NGELASYGEITWFVNTSDTFDKCFLGSSETADANRVFCGQMTAVY | |
| | | | | LFSEALNAAQIFAIYQLGLGYKGTFKFKAESDLFLAEHHKLLLYDG | |
| | | | | KLSSAIAFTYNPRATDAQLCLESSPKDNPSIFVHSPHALMLQDVKAV | |
| | | | | LTHSIQSAMHSIGGVQVLFPLFAQLDYRQYLSDEIDLTICSTLLAFIM | |
| | | | | ELLKNSIAMQEQMLACKGFLVIGYSLEKSSKSHVSRAVLELCLAFS | |
| | | | | KYLSNLQNGMPLLKQLCDHVLLNPAIWIHTPAKVQLMLYTYLSTEF | |
| | | | | IGTVNIYNTIRRVGTVLLIMHTLKYYYWAVNPQDRSGITPKGLDGP | |
| | | | | RPNQKEMLSLRAFLLMFIKQLVMKDSGVKEDELQAILNYLLTMHE | |
| | | | | DDNLMDVLQLLVALMSEHPNSMIPAFDQRNGLRVIYKLLASKSEGI | |
| | | | | RVQALKAMGYFLKHLAPKRKAEVMLGHGLFSLLAERLMLQTNLIT | |
| | | | | MTTYNVLFEILIEQIGTQVIHKQHPDPDSSVKIQNPQILKVIATLLRNS | |
| | | | | PQCPESMEVRRAFLSDMIKLFNNSRENRRSLLQCSVWQEWMLSLC | |
| | | | | YFNPKNSDEQKITEMVYAIFRILLYHAVKYEWGGWRVWVDTLSIT | |
| | | | | HSKVTFEIHKENLANIFREQQGKVDEEIGLCSSTSVQAASGIRRDINV | |
| | | | | SVGSQQPDTKDSPVCPHFTTNGNENSSIEKTSSLESASNIELQTTNTS | |
| | | | | YEEMKAEQENQELPDEGTLEETLTNETRNADDLEVSSDIIEAVAISS | |
| | | | | NSFITTGKDSMTVSEVTASISSPSEEDASEMPEFLDKSIVEEEEDDDY | |
| | | | | VELKVEGSPTEEANLPTELQDNSLSPAASEAGEKLDMFGNDDKLIF | |
| | | | | QEGKPVTEKQTDTETQDSKDSGIQTMTASGSSAMSPETTVSQIAVES | |
| | | | | DLGQMLEEGKKATNLTRETKLINDCHGSVSEASSEQKIAKLDVSNV | |
| | | | | ATDTERLELKASPNVEAPQPHRHVLEISRQHEQPGQGIAPDAVNGQ | |
| | | | | RRDSRSTVFRIPEFNWSQMHQRLLTDLLFSIETDIQMWRSHSTKTV | |
| | | | | MDFVNSSDNVIFVHNTIHLISQVMDNMVMACGGILPLLSAATSATH | |
| | | | | ELENIEPTQGLSIEASVTFLQRLISLVDVLIFASSLGFTEIEAEKSMSSG | |
| | | | | GILRQCLRLVCAVAVRNCLECQQHSQLKTRGDKALKPMHSLIPLGK | |
| | | | | SAAKSPVDIVTGGISPVRDLDRLLQDMDINRLRAVVFRDIEDSKQA | |
| | | | | QFLALAVVYFISVLMVSKYRDILEPQNERHSQSCTETGSENENVSLS | |
| | | | | EITPAAFSTLTTASVEESESTSSARRRDSGIGEETATGLGSHVEVTPH | |
| | | | | TAPPGVSAGPDAISEVLSTLSLEVNKSPETKNDRGNDLDTKATPSVS | |
| | | | | VSKNVNVKDILRSLVNIPADGVTVDPALLPPACLGALGDLSVEQPV | |
| | | | | QFRSFDRSVIVAAKKSAVSPSTFNTSIPTNAVSVVSSVDSAQASDMG | |
| | | | | GESPGSRSSNAKLPSVPTVDSVSQDPVSNMSITERLEHALEKAAPLL | |
| | | | | REIFVDFAPFLSRTLLGSHGQELLIEGTSLVCMKSSSSVVELVMLLCS | |
| | | | | QEWQNSIQKNAGLAFIELVNEGRLLSQTMKDHLVRVANEAEFILSR | |
| | | | | QRAEDIHRHAEFESLCAQYSADKREDEKMCDHLIRAAKYRDHVTA | |
| | | | | TQLIQKIINILTDKHGAWGNSAVSRPLEFWRLDYWEDDLRRRRRFV | |
| | | | | RNPLGSTHPEATLKTAVEHATDEDILAKGKQSIRSQALGNQNSENEI | |
| | | | | LLEGDDDTLSSVDEKDLENLAGPVSLSTPAQLVAPSVVVKGTLSVT | |
| | | | | SSELYFEVDEEDPNFKKIDPKILAYTEGLHGKWLFTEIRSIFSRRYLL | |
| | | | | QNTALEIFMANRVAVMFNFPDPATVKKVVNYLPRVGVGTSFGLPQ | |
| | | | | TRRISLASPRQLFKASNMTQRWQHREISNFEYLMFLNTIAGRSYNDL | |
| | | | | NQYPVFPWVITNYESEELDLTLPTNFRDLSKPIGALNPKRAAFFAER | |
| | | | | YESWEDDQVPKFHYGTHYSTASFVLAWLLRIEPFTTYFLNLQGGKF | |
| | | | | DHADRTFSSISRAWRNSQRDTSDIKELIPEFYYLPEMFVNFNNYNLG | |
| | | | | VMDDGTVVSDVELPPWAKTSEEFVHINRLALESEFVSCQLHQWIDL | |
| | | | | IFGYKQQGPEAVRALNVFYYLTYEGAVNLNSITDPVLREAVEAQIR | |
| | | | | SFGQTPSQLLIEPHPPRGSAMQVSPLMFTDKAQQDVIMVLKFPSNSP | |
| | | | | VTHVAANTQPGLATPAVITVTANRLFAVNKWHNLPAHQGAVQDQ | |
| | | | | PYQLPVEIDPLIGLSLPSLFAIH* | |
| LRBA | LPS responsive beige- | 987 | 148 | XYILSGSRDATLLLWYWNGKCSGIGDNPGSETAAPRAILTGHDYEV | 187. |
| | like anchor protein | | | TCAAVCAELGLVLSGSQEGPCLIHSMNGDLLRTLEGPENCLKPKLIQ | |
| | [Source:HGNC | | | ASREGHCVIFYENGLFCTFSVNGKLQATMETDDNIRVHHFWHGFR | |
| | Symbol; Acc:HGNC: | | | KHCAILQRL* | |
| | 1742] | | | | |
| LRBA | LPS responsive beige- | 987 | 1506 | XDNVIFVHNTIHLISQVMDNMVMACGGILPLLSAATSATHELENIEP | 188. |
| | like anchor protein | | | TQGLSIEASVTFLQRLISLVDVLIFASSLGFTEIEAEKSMSSGGILRQC | |
| | [Source:HGNC | | | LRLVCAVAVRNCLECQQHSQLKTRGDKALKPMHSLIPLGKSAAKS | |
| | Symbol; Acc:HGNC: | | | PVDIVTGGISPVRDLDRLLQDMDINRLRAVVFRDIEDSKQAQFLALA | |
| | 1742] | | | VVYFISVLMVSKYRDILEPQNERHSQSCTETGSENENVSLSEITPAAF | |
| | | | | STLTTASVEESESTSSARRRDSGIGEETATGLGSHVEVTPHTAPPGVS | |
| | | | | AGPDAISEVLSTLSLEVNKSPETKNDRGNDLDTKATPSVSVSKNVN | |
| | | | | VKDILRSLVNIPADGVTVDPALLPPACLGALGDLSVEQPVQFRSFDR | |
| | | | | SVIVAAKKSAVSPSTFNTSIPTNAVSVVSSVDSAQASDMGGESPGSR | |
| | | | | SSNAKLPSVPTVDSVSQDPVSNMSITERLEHALEKAAPLLREIFVDF | |
| | | | | APFLSRTLLGSHGQELLIEGTSLVCMKSSSSVVELVMLLCSQEWQN | |
| | | | | SIQKNAGLAFIELVNEGRLLSQTMKDHLVRVANEAEFILSRQRAEDI | |
| | | | | HRHAEFESLCAQYSADKREDEKMCDHLIRAAKYRDHVTATQLIQKI | |
| | | | | INILTDKHGAWGNSAVSRPLEFWRLDYWEDDLRRRRRFVRNPLGS | |
| | | | | THPEATLKTAVEHATDEDILAKGKQSIRSQALGNQNSENEILLEGDD | |
| | | | | DTLSSVDEKDLENLAGPVSLSTPAQLVAPSVVVKGTLSVTSSELYFE | |
| | | | | VDEEDPNFKKIDPKILAYTEGLHGKWLFTEIRSIFSRRYLLQNTALEI | |
| | | | | FMANRVAVMFNFPDPATVKKVVNYLPRVGVGTSFGLPQTRRISLA | |
| | | | | SPRQLFKASNMTQRWQHREISNFEYLMFLNTIAGRSYNDLNQYPVF | |
| | | | | PWVITNYESEELDLTLPTNFRDLSKPIGALNPKRAAFFAERYESWED | |
| | | | | DQVPKFHYGTHYSTASFVLAWLLRIEPFTTYFLNLQGGKFDHADRT | |
| | | | | FSSISRAWRNSQRDTSDIKELIPEFYYLPEMFVNFNNYNLGVMDDG | |
| | | | | TVVSDVELPPWAKTSEEFVHINRLALESEFVSCQLHQWIDLIFGYKQ | |
| | | | | QGPEAVRALNVFYYLTYEGAVNLNSITDPVLREAVEAQIRSFGQTP | |
| | | | | SQLLIEPHPPRGSAMQVSPLMFTDKAQQDVIMVLKFPSNSPVTHVA | |
| | | | | ANTQPGLATPAVITVTANRLFAVNKWHNLPAHQGAVQDQPYQLPV | |
| | | | | EIDPLIASNTGMHRRQITDLLDQSIQVHSQCFVITSDNRYILVCGFWD | |
| | | | | KSFRVYSTDTGRLIQVVFGHWDVVTCLARSESYIGGNCYILSGSRD | |
| | | | | ATLLLWYWNGKCSGIGDNPGSETAAPRAILTGHDYEVTCAAVCAE | |
| | | | | LGLVLSGSQEGPCLIHSMNGDLLRTLEGPENCLKPKLIQASREGHCV | |
| | | | | IFYENGLFCTFSVNGKLQATMETDDNIRAIQLSRDGQYLLTGGDRG | |
| | | | | VVVVRQVSDLKQLFAYPGCDAGIRAMALSYDQRCIISGMASGSIVL | |
| | | | | FYNDFNRWHHEYQTRY* | |
| LRBA | LPS responsive beige- | 987 | 1881 | MASEDNRVPSPPPTGDDGGGGGREETPTEGGALSLKPGLPIRGIRM | 189. |
| | like anchor protein | | | KFAVLTGLVEVGEVSNRDIVETVFNLLVGGQFDLEMNFIIQEGESIN | |
| | [Source:HGNC | | | CMVDLLEKCDITCQAEVWSMFTAILKKSIRNLQVCTEVGLVEKVLG | |
| | Symbol; Acc:HGNC: | | | KIEKVDNMIADLLVDMLGVLASYNLTVRELKLFFSKLQGDKGRWP | |
| | 1742] | | | PHAGKLLSVLKHMPQKYGPDAFFNFPGKSAAAIALPPIAKWPYQNG | |
| | | | | FTFHTWLRMDPVNNINVDKDKPYLYCFRTSKGLGYSAHFVGGCLI | |
| | | | | VTSIKSKGKGFQHCVKFDFKPQKWYMVTIVHIYNRWKNSELRCYV | |
| | | | | NGELASYGEITWFVNTSDTFDKCFLGSSETADANRVFCGQMTAVY | |
| | | | | LFSEALNAAQIFAIYQLGLGYKGTFKFKAESDLFLAEHHKLLLYDG | |
| | | | | KLSSAIAFTYNPRATDAQLCLESSPKDNPSIFVHSPHALMLQDVKAV | |
| | | | | LTHSIQSAMHSIGGVQVLFPLFAQLDYRQYLSDEIDLTICSTLLAFIM | |
| | | | | ELLKNSIAMQEQMLACKGFLVIGYSLEKSSKSHVSRAVLELCLAFS | |
| | | | | KYLSNLQNGMPLLKQLCDHVLLNPAIWIHTPAKVQLMLYTYLSTEF | |
| | | | | IGTVNIYNTIRRVGTVLLIMHTLKYYYWAVNPQDRSGITPKGLDGP | |
| | | | | RPNQKEMLSLRAFLLMFIKQLVMKDSGVKEDELQAILNYLLTMHE | |
| | | | | DDNLMDVLQLLVALMSEHPNSMIPAFDQRNGLRVIYKLLASKSEGI | |
| | | | | RVQALKAMGYFLKHLAPKRKAEVMLGHGLFSLLAERLMLQTNLIT | |
| | | | | MTTYNVLFEILIEQIGTQVIHKQHPDPDSSVKIQNPQILKVIATLLRNS | |
| | | | | PQCPESMEVRRAFLSDMIKLFNNSRENRRSLLQCSVWQEWMLSLC | |
| | | | | YFNPKNSDEQKITEMVYAIFRILLYHAVKYEWGGWRVWVDTLSIT | |
| | | | | HSKVTFEIHKENLANIFREQQGKVDEEIGLCSSTSVQAASGIRRDINV | |
| | | | | SVGSQQPDTKDSPVCPHFTTNGNENSSIEKTSSLESASNIELQTTNTS | |
| | | | | YEEMKAEQENQELPDEGTLEETLTNETRNADDLEVSSDIIEAVAISS | |
| | | | | NSFITTGKDSMTVSEVTASISSPSEEDASEMPEFLDKSIVEEEEDDDY | |
| | | | | VELKVEGSPTEEANLPTELQDNSLSPAASEAGEKLDMFGNDDKLIF | |
| | | | | QEGKPVTEKQTDTETQDSKDSGIQTMTASGSSAMSPETTVSQIAVES | |
| | | | | DLGQMLEEGKKATNLTRETKLINDCHGSVSEASSEQKIAKLDVSNV | |
| | | | | ATDTERLELKASPNVEAPQPHRHVLEISRQHEQPGQGIAPDAVNGQ | |
| | | | | RRDSRSTVFRIPEFNWSQMHQRLLTDLLFSIETDIQMWRSHSTKTV | |
| | | | | MDFVNSSDNVIFVHNTIHLISQVMDNMVMACGGILPLLSAATSATH | |
| | | | | ELENIEPTQGLSIEASVTFLQRLISLVDVLIFASSLGFTEIEAEKSMSSG | |
| | | | | GILRQCLRLVCAVAVRNCLECQQHSQLKTRGDKALKPMHSLIPLGK | |
| | | | | SAAKSPVDIVTGGISPVRDLDRLLQDMDINRLRAVVFRDIEDSKQA | |
| | | | | QFLALAVVYFISVLMVSKYRDILEPQNERHSQSCTETGSENENVSLS | |
| | | | | EITPAAFSTLTTASVEESESTSSARRRDSGIGEETATGLGSHVEVTPH | |
| | | | | TAPPGVSAGPDAISEVLSTLSLEVNKSPETKNDRGNDLDTKATPSVS | |
| | | | | VSKNVNVKDILRSLVNIPADGVTVDPALLPPACLGALGDLSVEQPV | |
| | | | | QFRSFDRSVIVAAKKSAVSPSTFNTSIPTNAVSVVSSVDSAQASDMG | |
| | | | | GESPGSRSSNAKLPSVPTVDSVSQDPVSNMSITERLEHALEKAAPLL | |
| | | | | REIFVDFAPFLSRTLLGSHGQELLIEGTSLVCMKSSSSVVELVMLLCS | |
| | | | | QVRVAKFYSEECRPCFYRTCQ* | |
| LRBA | LPS responsive beige- | 987 | 687 | GTSFGLPQTRRISLASPRQLFKASNMTQRWQHREISNFEYLMFLNTI | 190. |
| | like anchor protein | | | AGRSYNDLNQYPVFPWVITNYESEELDLTLPTNFRDLSKPIGALNPK | |
| | [Source:HGNC | | | RAAFFAERYESWEDDQVPKFHYGTHYSTASFVLAWLLRIEPFTTYF | |
| | Symbol; Acc:HGNC: | | | LNLQGGKFDHADRTFSSISRAWRNSQRDTSDIKELIPEFYYLPEMFV | |
| | 1742] | | | NFNNYNLGVMDDGTVVSDVELPPWAKTSEEFVHINRLALESEFVSC | |
| | | | | QLHQWIDLIFGYKQQGPEAVRALNVFYYLTYEGAVNLNSITDPVLR | |
| | | | | EAVEAQIRSFGQTPSQLLIEPHPPRGSAMQVYLLLQSPLMFTDKAQQ | |
| | | | | DVIMVLKFPSNSPVTHVAANTQPGLATPAVITVTANRLFAVNKWH | |
| | | | | NLPAHQGAVQDQPYQLPVEIDPLIASNTGMHRRQITDLLDQSIQVHS | |
| | | | | QCFVITSDNRYILVCGFWDKSFRVYSTDTGRLIQVVFGHWDVVTCL | |
| | | | | ARSESYIGGNCYILSGSRDATLLLWYWNGKCSGIGDNPGSETAAPR | |
| | | | | AILTGHDYEVTCAAVCAELGLVLSGSQEGPCLIHSMNGDLLRTLEG | |
| | | | | PENCLKPKLIQASREGHCVIFYENGLFCTFSVNGKLQATMETDDNIR | |
| | | | | AIQLSRDGQYLLTGGDRGVVVVRQVSDLKQLFAYPGCDAGIRAMA | |
| | | | | LSYDQRRPRSLQKFLSSVISVHHFWHGFRKHCAILQRL* | |
| LRBA | LPS responsive beige- | 987 | 2096 | GLFSLLAERLMLQTNLITMTTYNVLFEILIEQIGTQVIHKQHPDPDSS | 191. |
| | like anchor protein | | | VKIQNPQILKVIATLLRNSPQCPESMEVRRAFLSDMIKLFNNSRENR | |
| | [Source:HGNC | | | RSLLQCSVWQEWMLSLCYFNPKNSDEQKITEMVYAIFRILLYHAVK | |
| | Symbol; Acc:HGNC: | | | YEWGGWRVWVDTLSITHSKVTFEIHKENLANIFREQQGKVDEEIGL | |
| | 1742] | | | CSSTSVQAASGIRRDINVSVGSQQPDTKDSPVCPHFTTNGNENSSIE | |
| | | | | KTSSLESASNIELQTTNTSYEEMKAEQENQELPDEGTLEETLTNETR | |
| | | | | NADDLEVSSDIIEAVAISSNSFITTGKDSMTVSEVTASISSPSEEDASE | |
| | | | | MPEFLDKSIVEEEEDDDYVELKVEGSPTEEANLPTELQDNSLSPAAS | |
| | | | | EAGEKLDMFGNDDKLIFQEGKPVTEKQTDTETQDSKDSGIQTMTAS | |
| | | | | GSSAMSPETTVSQIAVESDLGQMLEEGKKATNLTRETKLINDCHGS | |
| | | | | VSEASSEQKIAKLDVSNVATDTERLELKASPNVEAPQPHRHVLEISR | |
| | | | | QHEQPGQGIAPDAVNGQRRDSRSTVFRIPEFNWSQMHQRLLTDLLF | |
| | | | | SIETDIQMWRSHSTKTVMDFVNSSDNVIFVHNTIHLISQVMDNMVM | |
| | | | | ACGGILPLLSAATSATHELENIEPTQGLSIEASVTFLQRLISLVDVLIF | |
| | | | | ASSLGFTEIEAEKSMSSGGILRQCLRLVCAVAVRNCLECQQHSQLK | |
| | | | | TRGDKALKPMHSLIPLGKSAAKSPVDIVTGGISPVRDLDRLLQDMDI | |
| | | | | NRLRAVVFRDIEDSKQAQFLALAVVYFISVLMVSKYRDILEPQNER | |
| | | | | HSQSCTETGSENENVSLSEITPAAFSTLTTASVEESESTSSARRRDSGI | |
| | | | | GEETATGLGSHVEVTPHTAPPGVSAGPDAISEVLSTLSLEVNKSPET | |
| | | | | KNDRGNDLDTKATPSVSVSKNVNVKDILRSLVNIPADGVTVDPALL | |
| | | | | PPACLGALGDLSVEQPVQFRSFDRSVIVAAKKSAVSPSTFNTSIPTN | |
| | | | | AVSVVSSVDSAQASDMGGESPGSRSSNAKLPSVPTVDSVSQDPVSN | |
| | | | | MSITERLEHALEKAAPLLREIFVDFAPFLSRTLLGSHGQELLIEGTSL | |
| | | | | VCMKSSSSVVELVMLLCSQEWQNSIQKNAGLAFIELVNEGRLLSQT | |
| | | | | MKDHLVRVANEAEFILSRQRAEDIHRHAEFESLCAQYSADKREDEK | |
| | | | | MCDHLIRAAKYRDHVTATQLIQKIINILTDKHGAWGNSAVSRPLEF | |
| | | | | WRLDYWEDDLRRRRRFVRNPLGSTHPEATLKTAVEHATDEDILAK | |
| | | | | GKQSIRSQALGNQNSENEILLEGDDDTLSSVDEKDLENLAGPVSLST | |
| | | | | PAQLVAPSVVVKGTLSVTSSELYFEVDEEDPNFKKIDPKILAYTEGL | |
| | | | | HGKWLFTEIRSIFSRRYLLQNTALEIFMANRVAVMFNFPDPATVKK | |
| | | | | VVNYLPRVGVGTSFGLPQTRRISLASPRQLFKASNMTQRWQHREIS | |
| | | | | NFEYLMFLNTIAGRSYNDLNQYPVFPWVITNYESEELDLTLPTNFRD | |
| | | | | LSKPIGALNPKRAAFFAERYESWEDDQVPKFHYGTHYSTASFVLA | |
| | | | | WLLRIEPFTTYFLNLQGGKFDHADRTFSSISRAWRNSQRDTSDIKELI | |
| | | | | PEFYYLPEMFVNFNNYNLGVMDDGTVVSDVELPPWAKTSEEFVHI | |
| | | | | NRLALESEFVSCQLHQWIDLIFGYKQQGPEAVRALNVFYYLTYEGA | |
| | | | | VNLNSITDPVLREAVEAQIRSFGQTPSQLLIEPHPPRGSAMQVYLLL | |
| | | | | QSPLMFTDKAQQDVIMVLKFPSNSPVTHVAANTQPGLATPAVITVT | |
| | | | | ANRLFAVNKWHNLPAHQGAVQDQPYQLPVEIDPLIASNTGMHRRQ | |
| | | | | ITDLLDQSIQVHSQCFVITSDNRYILVCGFWDKSFRVYSTDTGRLIQ | |
| | | | | VVFGHWDVVTCLARSESYIGGNCYILSGSRDATLLLWYWNGKCSG | |
| | | | | IGDNPGSETAAPRAILTGHDYEVTCAAVCAELGLVLSGSQEGPCLIH | |
| | | | | SMNGDLLRTLEGPENCLKPKLIQASREGHCVIFYENGLFCTFSVNGK | |
| | | | | LQATMETDDNIRAIQLSRDGQYLLTGGDRGVVVVRQVSDLKQLFA | |
| | | | | YPGCDAGIRAMALSYDQRCIISGMASGSIVLFYNDFNRWHHEYQTR | |
| | | | | Y* | |
| LRBA | LPS responsive beige- | 987 | 238 | HYSTASFVLAWLLRIEPFTTYFLNLQGGKFDHADRTFSSISRAWRNS | 192. |
| | like anchor protein | | | QRDTSDIKELIPEFYYLPEMFVNFNNYNLGVMDDGTVVSDVELPPW | |
| | [Source:HGNC | | | AKTSEEFVHINRLQGPEAVRALNVFYYLTYEGAVNLNSITDPVLRE | |
| | Symbol; Acc:HGNC: | | | AVEAQIRSFGQTPSQLLIEPHPPRGSAMQVYLLLQSPLMFTDKAQQ | |
| | 1742] | | | DVIMVLKFPSNSPVTHVAANTQPGLATPAVITVTANRLFAVNKWH | |
| | | | | NLPAHQGA | |
| LRBA | LPS responsive beige- | 987 | 2852 | MASEDNRVPSPPPTGDDGGGGGREETPTEGGALSLKPGLPIRGIRM | 193. |
| | like anchor protein | | | KFAVLTGLVEVGEVSNRDIVETVFNLLVGGQFDLEMNFIIQEGESIN | |
| | [Source:HGNC | | | CMVDLLEKCDITCQAEVWSMFTAILKKSIRNLQVCTEVGLVEKVLG | |
| | Symbol; Acc:HGNC: | | | KIEKVDNMIADLLVDMLGVLASYNLTVRELKLFFSKLQGDKGRWP | |
| | 1742] | | | PHAGKLLSVLKHMPQKYGPDAFFNFPGKSAAAIALPPIAKWPYQNG | |
| | | | | FTFHTWLRMDPVNNINVDKDKPYLYCFRTSKGLGYSAHFVGGCLI | |
| | | | | VTSIKSKGKGFQHCVKFDFKPQKWYMVTIVHIYNRWKNSELRCYV | |
| | | | | NGELASYGEITWFVNTSDTFDKCFLGSSETADANRVFCGQMTAVY | |
| | | | | LFSEALNAAQIFAIYQLGLGYKGTFKFKAESDLFLAEHHKLLLYDG | |
| | | | | KLSSAIAFTYNPRATDAQLCLESSPKDNPSIFVHSPHALMLQDVKAV | |
| | | | | LTHSIQSAMHSIGGVQVLFPLFAQLDYRQYLSDEIDLTICSTLLAFIM | |
| | | | | ELLKNSIAMQEQMLACKGFLVIGYSLEKSSKSHVSRAVLELCLAFS | |
| | | | | KYLSNLQNGMPLLKQLCDHVLLNPAIWIHTPAKVQLMLYTYLSTEF | |
| | | | | IGTVNIYNTIRRVGTVLLIMHTLKYYYWAVNPQDRSGITPKGLDGP | |
| | | | | RPNQKEMLSLRAFLLMFIKQLVMKDSGVKEDELQAILNYLLTMHE | |
| | | | | DDNLMDVLQLLVALMSEHPNSMIPAFDQRNGLRVIYKLLASKSEGI | |
| | | | | RVQALKAMGYFLKHLAPKRKAEVMLGHGLFSLLAERLMLQTNLIT | |
| | | | | MTTYNVLFEILIEQIGTQVIHKQHPDPDSSVKIQNPQILKVIATLLRNS | |
| | | | | PQCPESMEVRRAFLSDMIKLFNNSRENRRSLLQCSVWQEWMLSLC | |
| | | | | YFNPKNSDEQKITEMVYAIFRILLYHAVKYEWGGWRVWVDTLSIT | |
| | | | | HSKVTFEIHKENLANIFREQQGKVDEEIGLCSSTSVQAASGIRRDINV | |
| | | | | SVGSQQPDTKDSPVCPHFTTNGNENSSIEKTSSLESASNIELQTTNTS | |
| | | | | YEEMKAEQENQELPDEGTLEETLTNETRNADDLEVSSDIIEAVAISS | |
| | | | | NSFITTGKDSMTVSEVTASISSPSEEDASEMPEFLDKSIVEEEEDDDY | |
| | | | | VELKVEGSPTEEANLPTELQDNSLSPAASEAGEKLDMFGNDDKLIF | |
| | | | | QEGKPVTEKQTDTETQDSKDSGIQTMTASGSSAMSPETTVSQIAVES | |
| | | | | DLGQMLEEGKKATNLTRETKLINDCHGSVSEASSEQKIAKLDVSNV | |
| | | | | ATDTERLELKASPNVEAPQPHRHVLEISRQHEQPGQGIAPDAVNGQ | |
| | | | | RRDSRSTVFRIPEFNWSQMHQRLLTDLLFSIETDIQMWRSHSTKTV | |
| | | | | MDFVNSSDNVIFVHNTIHLISQVMDNMVMACGGILPLLSAATSATH | |
| | | | | ELENIEPTQGLSIEASVTFLQRLISLVDVLIFASSLGFTEIEAEKSMSSG | |
| | | | | GILRQCLRLVCAVAVRNCLECQQHSQLKTRGDKALKPMHSLIPLGK | |
| | | | | SAAKSPVDIVTGGISPVRDLDRLLQDMDINRLRAVVFRDIEDSKQA | |
| | | | | QFLALAVVYFISVLMVSKYRDILEPQNERHSQSCTETGSENENVSLS | |
| | | | | EITPAAFSTLTTASVEESESTSSARRRDSGIGEETATGLGSHVEVTPH | |
| | | | | TAPPGVSAGPDAISEVLSTLSLEVNKSPETKNDRGNDLDTKATPSVS | |
| | | | | VSKNVNVKDILRSLVNIPADGVTVDPALLPPACLGALGDLSVEQPV | |
| | | | | QFRSFDRSVIVAAKKSAVSPSTFNTSIPTNAVSVVSSVDSAQASDMG | |
| | | | | GESPGSRSSNAKLPSVPTVDSVSQDPVSNMSITERLEHALEKAAPLL | |
| | | | | REIFVDFAPFLSRTLLGSHGQELLIEGTSLVCMKSSSSVVELVMLLCS | |
| | | | | QEWQNSIQKNAGLAFIELVNEGRLLSQTMKDHLVRVANEAEFILSR | |
| | | | | QRAEDIHRHAEFESLCAQYSADKREDEKMCDHLIRAAKYRDHVTA | |
| | | | | TQLIQKIINILTDKHGAWGNSAVSRPLEFWRLDYWEDDLRRRRRFV | |
| | | | | RNPLGSTHPEATLKTAVEHATDEDILAKGKQSIRSQALGNQNSENEI | |
| | | | | LLEGDDDTLSSVDEKDLENLAGPVSLSTPAQLVAPSVVVKGTLSVT | |
| | | | | SSELYFEVDEEDPNFKKIDPKILAYTEGLHGKWLFTEIRSIFSRRYLL | |
| | | | | QNTALEIFMANRVAVMFNFPDPATVKKVVNYLPRVGVGTSFGLPQ | |
| | | | | TRRISLASPRQLFKASNMTQRWQHREISNFEYLMFLNTIAGRSYNDL | |
| | | | | NQYPVFPWVITNYESEELDLTLPTNFRDLSKPIGALNPKRAAFFAER | |
| | | | | YESWEDDQVPKFHYGTHYSTASFVLAWLLRIEPFTTYFLNLQGGKF | |
| | | | | DHADRTFSSISRAWRNSQRDTSDIKELIPEFYYLPEMFVNFNNYNLG | |
| | | | | VMDDGTVVSDVELPPWAKTSEEFVHINRLALESEFVSCQLHQWIDL | |
| | | | | IFGYKQQGPEAVRALNVFYYLTYEGAVNLNSITDPVLREAVEAQIR | |
| | | | | SFGQTPSQLLIEPHPPRGSAMQVSPLMFTDKAQQDVIMVLKFPSNSP | |
| | | | | VTHVAANTQPGLATPAVITVTANRLFAVNKWHNLPAHQGAVQDQ | |
| | | | | PYQLPVEIDPLIASNTGMHRRQITDLLDQSIQVHSQCFVITSDNRYIL | |
| | | | | VCGFWDKSFRVYSTDTGRLIQVVFGHWDVVTCLARSESYIGGNCYI | |
| | | | | LSGSRDATLLLWYWNGKCSGIGDNPGETAAPRAILTGHDYEVTCA | |
| | | | | AVCAELGLVLSGSQEGPCLIHSMNGDLLRTLEGPENCLKPKLIQASR | |
| | | | | EGHCVIFYENGLFCTFSVNGKLQATMETDDNIRAIQLSRDGQYLLT | |
| | | | | GGDRGVVVVRQVSDLKQLFAYPGCDAGIRAMALSYDQRCIISGMA | |
| | | | | SGSIVLFYNDFNRWHHEYQTRY* | |
| LRBA | LPS responsive beige- | 987 | 243 | XTVKKVVNYLPRVGVGTSFGLPQTRRISLASPRQLFKASNMTQRW | 194. |
| | like anchor protein | | | QHREISNFEYLMFLNTIAGRSYNDLNQYPVFPWVITNYESEELDLTL | |
| | [Source:HGNC | | | PTNFRDLSKPIGALNPKRAAFFAERYESWEDDQVPKFHYGTHYSTA | |
| | Symbol; Acc:HGNC: | | | SFVLAWLLRIEPFTTYFLNLQGGKFDHADRTFSSISRAWRNSQRDTS | |
| | 1742] | | | DIKELIPEFYYLPEMFVNFNNYNLGVMDDGTVVSDVELPPWAKTSE | |
| | | | | EFVHINRLVPF* | |
| LRBA | LPS responsive beige- | 987 | 2853 | MASEDNRVPSPPPTGDDGGGGGREETPTEGGALSLKPGLPIRGIRM | 195. |
| | like anchor protein | | | KFAVLTGLVEVGEVSNRDIVETVFNLLVGGQFDLEMNFIIQEGESIN | |
| | [Source:HGNC | | | CMVDLLEKCDITCQAEVWSMFTAILKKSIRNLQVCTEVGLVEKVLG | |
| | Symbol; Acc:HGNC: | | | KIEKVDNMIADLLVDMLGVLASYNLTVRELKLFFSKLQGDKGRWP | |
| | 1742] | | | PHAGKLLSVLKHMPQKYGPDAFFNFPGKSAAAIALPPIAKWPYQNG | |
| | | | | FTFHTWLRMDPVNNINVDKDKPYLYCFRTSKGLGYSAHFVGGCLI | |
| | | | | VTSIKSKGKGFQHCVKFDFKPQKWYMVTIVHIYNRWKNSELRCYV | |
| | | | | NGELASYGEITWFVNTSDTFDKCFLGSSETADANRVFCGQMTAVY | |
| | | | | LFSEALNAAQIFAIYQLGLGYKGTFKFKAESDLFLAEHHKLLLYDG | |
| | | | | KLSSAIAFTYNPRATDAQLCLESSPKDNPSIFVHSPHALMLQDVKAV | |
| | | | | LTHSIQSAMHSIGGVQVLFPLFAQLDYRQYLSDEIDLTICSTLLAFIM | |
| | | | | ELLKNSIAMQEQMLACKGFLVIGYSLEKSSKSHVSRAVLELCLAFS | |
| | | | | KYLSNLQNGMPLLKQLCDHVLLNPAIWIHTPAKVQLMLYTYLSTEF | |
| | | | | IGTVNIYNTIRRVGTVLLIMHTLKYYYWAVNPQDRSGITPKGLDGP | |
| | | | | RPNQKEMLSLRAFLLMFIKQLVMKDSGVKEDELQAILNYLLTMHE | |
| | | | | DDNLMDVLQLLVALMSEHPNSMIPAFDQRNGLRVIYKLLASKSEGI | |
| | | | | RVQALKAMGYFLKHLAPKRKAEVMLGHGLFSLLAERLMLQTNLIT | |
| | | | | MTTYNVLFEILIEQIGTQVIHKQHPDPDSSVKIQNPQILKVIATLLRNS | |
| | | | | PQCPESMEVRRAFLSDMIKLFNNSRENRRSLLQCSVWQEWMLSLC | |
| | | | | YFNPKNSDEQKITEMVYAIFRILLYHAVKYEWGGWRVWVDTLSIT | |
| | | | | HSKVTFEIHKENLANIFREQQGKVDEEIGLCSSTSVQAASGIRRDINV | |
| | | | | SVGSQQPDTKDSPVCPHFTTNGNENSSIEKTSSLESASNIELQTTNTS | |
| | | | | YEEMKAEQENQELPDEGTLEETLTNETRNADDLEVSSDIIEAVAISS | |
| | | | | NSFITTGKDSMTVSEVTASISSPSEEDASEMPEFLDKSIVEEEEDDDY | |
| | | | | VELKVEGSPTEEANLPTELQDNSLSPAASEAGEKLDMFGNDDKLIF | |
| | | | | QEGKPVTEKQTDTETQDSKDSGIQTMTASGSSAMSPETTVSQIAVES | |
| | | | | DLGQMLEEGKKATNLTRETKLINDCHGSVSEASSEQKIAKLDVSNV | |
| | | | | ATDTERLELKASPNVEAPQPHRHVLEISRQHEQPGQGIAPDAVNGQ | |
| | | | | RRDSRSTVFRIPEFNWSQMHQRLLTDLLFSIETDIQMWRSHSTKTV | |
| | | | | MDFVNSSDNVIFVHNTIHLISQVMDNMVMACGGILPLLSAATSATH | |
| | | | | ELENIEPTQGLSIEASVTFLQRLISLVDVLIFASSLGFTEIEAEKSMSSG | |
| | | | | GILRQCLRLVCAVAVRNCLECQQHSQLKTRGDKALKPMHSLIPLGK | |
| | | | | SAAKSPVDIVTGGISPVRDLDRLLQDMDINRLRAVVFRDIEDSKQA | |
| | | | | QFLALAVVYFISVLMVSKYRDILEPQNERHSQSCTETGSENENVSLS | |
| | | | | EITPAAFSTLTTASVEESESTSSARRRDSGIGEETATGLGSHVEVTPH | |
| | | | | TAPPGVSAGPDAISEVLSTLSLEVNKSPETKNDRGNDLDTKATPSVS | |
| | | | | VSKNVNVKDILRSLVNIPADGVTVDPALLPPACLGALGDLSVEQPV | |
| | | | | QFRSFDRSVIVAAKKSAVSPSTFNTSIPTNAVSVVSSVDSAQASDMG | |
| | | | | GESPGSRSSNAKLPSVPTVDSVSQDPVSNMSITERLEHALEKAAPLL | |
| | | | | REIFVDFAPFLSRTLLGSHGQELLIEGTSLVCMKSSSSVVELVMLLCS | |
| | | | | QEWQNSIQKNAGLAFIELVNEGRLLSQTMKDHLVRVANEAEFILSR | |
| | | | | QRAEDIHRHAEFESLCAQYSADKREDEKMCDHLIRAAKYRDHVTA | |
| | | | | TQLIQKIINILTDKHGAWGNSAVSRPLEFWRLDYWEDDLRRRRRFV | |
| | | | | RNPLGSTHPEATLKTAVEHATDEDILAKGKQSIRSQALGNQNSENEI | |
| | | | | LLEGDDDTLSSVDEKDLENLAGPVSLSTPAQLVAPSVVVKGTLSVT | |
| | | | | SSELYFEVDEEDPNFKKIDPKILAYTEGLHGKWLFTEIRSIFSRRYLL | |
| | | | | QNTALEIFMANRVAVMFNFPDPATVKKVVNYLPRVGVGTSFGLPQ | |
| | | | | TRRISLASPRQLFKASNMTQRWQHREISNFEYLMFLNTIAGRSYNDL | |
| | | | | NQYPVFPWVITNYESEELDLTLPTNFRDLSKPIGALNPKRAAFFAER | |
| | | | | YESWEDDQVPKFHYGTHYSTASFVLAWLLRIEPFTTYFLNLQGGKF | |
| | | | | DHADRTFSSISRAWRNSQRDTSDIKELIPEFYYLPEMFVNFNNYNLG | |
| | | | | VMDDGTVVSDVELPPWAKTSEEFVHINRLALESEFVSCQLHQWIDL | |
| | | | | IFGYKQQGPEAVRALNVFYYLTYEGAVNLNSITDPVLREAVEAQIR | |
| | | | | SFGQTPSQLLIEPHPPRGSAMQVSPLMFTDKAQQDVIMVLKFPSNSP | |
| | | | | VTHVAANTQPGLATPAVITVTANRLFAVNKWHNLPAHQGAVQDQ | |
| | | | | PYQLPVEIDPLIASNTGMHRRQITDLLDQSIQVHSQCFVITSDNRYIL | |
| | | | | VCGFWDKSFRVYSTDTGRLIQVVFGHWDVVTCLARSESYIGGNCYI | |
| | | | | LSGSRDATLLLWYWNGKCSGIGDNPGSETAAPRAILTGHDYEVTC | |
| | | | | AAVCAELGLVLSGSQEGPCLIHSMNGDLLRTLEGPENCLKPKLIQAS | |
| | | | | REGHCVIFYENGLFCTFSVNGKLQATMETDDNIRAIQLSRDGQYLL | |
| | | | | TGGDRGVVVVRQVSDLKQLFAYPGCDAGIRAMALSYDQRCIISGM | |
| | | | | ASGSIVLFYNDFNRWHHEYQTRY* | |
| FBXW7 | F-box and WD repeat | 55294 | 708 | MNQELLSVGSKRRRTGGSLRGNPSSSQVDEEQMNRVVEEEQQQQL | 196. |
| | domain containing 7 | | | RQQEEEHTARNGEVVGVEPRPGGQNDSQQGQLEENNNRFISVDED | |
| | [Source:HGNC | | | SSGNQEEQEEDEEHAGEQDEEDEEEEEMDQESDDFDQSDDSSREDE | |
| | Symbol; Acc:HGNC: | | | HTHTNSVTNSSSIVDLPVHQLSSPFYTKTTKMKRKLDHGSEVRSFSL | |
| | 16712] | | | GKKPCKVSEYTSTTGLVPCSATPTTFGDLRAANGQGQQRRRITSVQ | |
| | | | | PPTGLQEWLKMFQSWSGPEKLLALDELIDSCEPTQVKHMMQVIEPQ | |
| | | | | FQRDFISLLPKELALYVLSFLEPKDLLQAAQTCRYWRILAEDNLLW | |
| | | | | REKCKEEGIDEPLHIKRRKVIKPGFIHSPWKSAYIRQHRIDTNWRRG | |
| | | | | ELKSPKVLKGHDDHVITCLQFCGNRIVSGSDDNTLKVWSAVTGKC | |
| | | | | LRTLVGHTGGVWSSQMRDNIIISGSTDRTLKVWNAETGECIHTLYG | |
| | | | | HTSTVRCMHLHEKRVVSGSRDATLRVWDIETGQCLHVLMGHVAA | |
| | | | | VRCVQYDGRRVVSGAYDFMVKVWDPETETCLHTLQGHTNRVYSL | |
| | | | | QFDGIHVVSGSLDTSIRVWDVETGNCIHTLTGHQSLTSGMELKDNIL | |
| | | | | VSGNADSTVKIWDIKTGQCLQTLQGPNKHQSAVTCLQFNKNFVITS | |
| | | | | SDDGTVKLWDLKTGEFIRNLVTLESGGSGGVVWRIRASNTKLVCA | |
| | | | | VGSRNGTEETKLLVLDFDVDMK* | |
| FBXW7 | F-box and WD repeat | 55294 | 590 | MSKPGKPTLNHGLVPVDLKSAKEPLPHQTVMKIFSISIIAQGLPFCRR | 197. |
| | domain containing 7 | | | RMKRKLDHGSEVRSFSLGKKPCKVSEYTSTTGLVPCSATPTTFGDL | |
| | [Source:HGNC | | | RAANGQGQQRRRITSVQPPTGLQEWLKMFQSWSGPEKLLALDELI | |
| | Symbol; Acc:HGNC: | | | DSCEPTQVKHMMQVIEPQFQRDFISLLPKELALYVLSFLEPKDLLQA | |
| | 16712] | | | AQTCRYWRILAEDNLLWREKCKEEGIDEPLHIKRRKVIKPGFIHSPW | |
| | | | | KSAYIRQHRIDTNWRRGELKSPKVLKGHDDHVITCLQFCGNRIVSG | |
| | | | | SDDNTLKVWSAVTGKCLRTLVGHTGGVWSSQMRDNIIISGSTDRTL | |
| | | | | KVWNAETGECIHTLYGHTSTVRCMHLHEKRVVSGSRDATLRVWDI | |
| | | | | ETGQCLHVLMGHVAAVRCVQYDGRRVVSGAYDFMVKVWDPETE | |
| | | | | TCLHTLQGHTNRVYSLQFDGIHVVSGSLDTSIRVWDVETGNCIHTL | |
| | | | | TGHQSLTSGMELKDNILVSGNADSTVKIWDIKTGQCLQTLQGPNKH | |
| | | | | QSAVTCLQFNKNFVITSSDDGTVKLWDLKTGEFIRNLVTLESGGSG | |
| | | | | GVVWRIRASNTKLVCAVGSRNGTEETKLLVLDFDVDMK* | |
| FBXW7 | F-box and WD repeat | 55294 | 628 | MCVPRSGLILSCICLYCGVLLPVLLPNLPFLTCLSMSTLESVTYLPEK | 198. |
| | domain containing 7 | | | GLYCQRLPSSRTHGGTESLKGKNTENMGFYGTLKMIFYKMKRKLD | |
| | [Source:HGNC | | | HGSEVRSFSLGKKPCKVSEYTSTTGLVPCSATPTTFGDLRAANGQG | |
| | Symbol; Acc:HGNC: | | | QQRRRITSVQPPTGLQEWLKMFQSWSGPEKLLALDELIDSCEPTQV | |
| | 16712] | | | KHMMQVIEPQFQRDFISLLPKELALYVLSFLEPKDLLQAAQTCRYW | |
| | | | | RILAEDNLLWREKCKEEGIDEPLHIKRRKVIKPGFIHSPWKSAYIRQ | |
| | | | | HRIDTNWRRGELKSPKVLKGHDDHVITCLQFCGNRIVSGSDDNTLK | |
| | | | | VWSAVTGKCLRTLVGHTGGVWSSQMRDNIIISGSTDRTLKVWNAE | |
| | | | | TGECIHTLYGHTSTVRCMHLHEKRVVSGSRDATLRVWDIETGQCL | |
| | | | | HVLMGHVAAVRCVQYDGRRVVSGAYDFMVKVWDPETETCLHTL | |
| | | | | QGHTNRVYSLQFDGIHVVSGSLDTSIRVWDVETGNCIHTLTGHQSL | |
| | | | | TSGMELKDNILVSGNADSTVKIWDIKTGQCLQTLQGPNKHQSAVTC | |
| | | | | LQFNKNFVITSSDDGTVKLWDLKTGEFIRNLVTLESGGSGGVVWRI | |
| | | | | RASNTKLVCAVGSRNGTEETKLLVLDFDVDMK* | |
| FBXW7 | F-box and WD repeat | 55294 | 70 | MNQELLSVGSKRRRTGGSLRGNPSSSQVDEEQMNRVVEEEQQQQL | 199. |
| | domain containing 7 | | | RQQEEEHTARNGEVVGVEPRPGGQN | |
| | [Source:HGNC | | | | |
| | Symbol; Acc:HGNC: | | | | |
| | 16712] | | | | |
| FBXW7 | F-box and WD repeat | 55294 | 158 | MNQELLSVGSKRRRTGGSLRGNPSSSQVDEEQMNRVVEEEQQQQL | 200. |
| | domain containing 7 | | | RQQEEEHTARNGEVVGVEPRPGGQNDSQQGQLEENNNRFISVDED | |
| | [Source:HGNC | | | | |
| | Symbol; Acc:HGNC: | | | SSGNQEEQEEDEEHAGEQDEEDEEEEEMDQESDDFDQSDDSSREDE | |
| | 16712] | | | HTHTNSVTNSSSIVDLPVHQLS | |
| FBXW7 | F-box and WD repeat | 55294 | 177 | MNQELLSVGSKRRRTGGSLRGNPSSSQVDEEQMNRVVEEEQQQQL | 201. |
| | domain containing 7 | | | RQQEEEHTARNGEVVGVEPRPGGQNDSQQGQLEENNNRFISVDED | |
| | [Source:HGNC | | | SSGNQEEQEEDEEHAGEQDEEDEEEEEMDQESDDFDQSDDSSREDE | |
| | Symbol; Acc:HGNC: | | | HTHTNSVTNSSSIVDLPVHQLSSPFYTKTTKVSIFNILLT* | |
| | 16712] | | | | |
| PRKD3 | protein kinase D3 | 23683 | 891 | MSANNSPPSAQKSVLPTAIPAVLPAASPCSSPKTGLSARLSNGSFSAP | 202. |
| | [Source:HGNC | | | SLTNSRGSVHTVSFLLQIGLTRESVTIEAQELSLSAVKDLVCSIVYQK | |
| | Symbol; Acc:HGNC: | | | FPECGFFGMYDKILLFRHDMNSENILQLITSADEIHEGDLVEVVLSA | |
| | 9408] | | | LATVEDFQIRPHTLYVHSYKAPTFCDYCGEMLWGLVRQGLKCEGC | |
| | | | | GLNYHKRCAFKIPNNCSGVRKRRLSNVSLPGPGLSVPRPLQPEYVA | |
| | | | | LPSEESHVHQEPSKRIPSWSGRPIWMEKMVMCRVKVPHTFAVHSYT | |
| | | | | RPTICQYCKRLLKGLFRQGMQCKDCKFNCHKRCASKVPRDCLGEV | |
| | | | | TFNGEPSSLGTDTDIPMDIDNNDINSDSSRGLDDTEEPSPPEDKMFFL | |
| | | | | DPSDLDVERDEEAVKTISPSTSNNIPLMRVVQSIKHTKRKSSTMVKE | |
| | | | | GWMVHYTSRDNLRKRHYWRLDSKCLTLFQNESGSKYYKEIPLSEIL | |
| | | | | RISSPRDFTNISQGSNPHCFEIITDTMVYFVGENNGDSSHNPVLAATG | |
| | | | | VGLDVAQSWEKAIRQALMPVTPQASVCTSPGQGKDHKDLSTSISVS | |
| | | | | NCQIQENVDISTVYQIFADEVLGSGQFGIVYGGKHRKTGRDVAIKVI | |
| | | | | DKMRFPTKQESQLRNEVAILQNLHHPGIVNLECMFETPERVFVVME | |
| | | | | KLHGDMLEMILSSEKSRLPERITKFMVTQILVALRNLHFKNIVHCDL | |
| | | | | KPENVLLASAEPFPQVKLCDFGFARIIGEKSFRRSVVGTPAYLAPEV | |
| | | | | LRSKGYNRSLDMWSVGVIIYVSLSGTFPFNEDEDINDQIQNAAFMY | |
| | | | | PPNPWREISGEAIDLINNLLQVKMRKRYSVDKSLSHPWLQDYQTWL | |
| | | | | DLREFETRIGERYITHESDDARWEIHAYTHNLVYPKHFIMAPNPDD | |
| | | | | MEEDP* | |
| PRKD3 | protein kinase D3 | 23683 | 185 | XTSISVSNCQIQENVDISTVYQIFADEVLGSGQFGIVYGGKHRKTGR | 203. |
| | [Source:HGNC | | | DVAIKVIDKMRFPTKQESQLRNEVAILQILVALRNLHFKNIVHCDLK | |
| | Symbol; Acc:HGNC: | | | PENVLLASAEPFPQVKLCDFGFARIIGEKSFRRSVVGTPAYLAPEVL | |
| | 9408] | | | RSKGYNRSLDMWSVGVIIYVSLSGTFPFNEDEDINDQIQNAAFM | |
| PRKD3 | protein kinase D3 | 23683 | 173 | TDTMVYFVGENNGDSSHNPVLAATGVGLDVAQSWEKAIRQALMP | 204. |
| | [Source:HGNC | | | VTPQASVCTSPGQGKDHKDLSTSISVSNCQIQENVDISTVYQIFADE | |
| | Symbol; Acc:HGNC: | | | VLGSGQFGIVYGDLSVLRVVTSLEDFLSSEEQRTVRGKHRKTGRDV | |
| | 9408] | | | AIKVIDKMRFPTKQESQLRNEVAILQNLHHPGIVNL | |
| PRKD3 | protein kinase D3 | 23683 | 181 | MYDKILLFRHDMNSENILQLITSADEIHEGDLVEVVLSALATVEDFQ | 205. |
| | [Source:HGNC | | | IRPHTLYVHSYKAPTFCDYCGEMLWGLVRQGLKCEGCGLNYHKRC | |
| | Symbol; Acc:HGNC: | | | AFKIPNNCSGVRKRRLSNVSLPGPGLSVPRPLQPEYVALPSEESHVH | |
| | 9408] | | | QEPSKRIPSWSGRPIWMEKMVMCRVKVPHTFAVHSYTRPTIC | |
| XPNPEP1 | X-prolyl | 7511 | 643 | MAASRKPPRVRVNHQDFQLRNLRIIEPNEVTHSGDTGVETDGRMPP | 206. |
| | aminopeptidase 1 | | | KVTSELLRQLRQAMRNSEYVTEPIQAYIIPSGDAHQSEYIAPCDCRR | |
| | [Source:HGNC | | | AFVSGFDGSAGTAIITEEHAAMWTDGRYFLQAAKQMDSNWTLMK | |
| | Symbol; Acc:HGNC: | | | MGLKDTPTQEDWLVSVLPEGSRVGVDPLIIPTDYWKKMAKVLRSA | |
| | 12822] | | | GHHLIPVKENLVDKIWTDRPERPCKPLLTLGLDYTGISWKDKVADL | |
| | | | | RLKMAERNVMWFVVTALDEIAWLFNLRGSDVEHNPVFFSYAIIGLE | |
| | | | | TIMLFIDGDRIDAPSVKEHLLLDLGLEAEYRIQVHPYKSILSELKALC | |
| | | | | ADLSPREKVWVSDKASYAVSETIPKDHRCCMPYTPICIAKAVKNSA | |
| | | | | ESEGMRRAHIKDAVALCELFNWLEKEVPKGGVTEISAADKAEEFRR | |
| | | | | QQADFVDLSFPTISSTGPNGAIIHYADGTTDVTRTMHFGTPTAYEKE | |
| | | | | CFTYVLKGHIAVSAAVFPTGTKGHLLDSFARSALWDSGLDYLHGT | |
| | | | | GHGVGSFLNVHEGPCGISYKTFSDEPLEAGMIVTDEPGYYEDGAFGI | |
| | | | | RIENVVLVVPVKTKYNFNNRGSLTFEPLTLVPIQTKMIDVDSLTDKE | |
| | | | | CDWLNNYHLTCRDVIGKELQKQGRQEALEWLIRETQPISKQH* | |
| XPNPEP1 | X-prolyl | 7511 | 303 | MPPKVTSELLRQLRQAMRNSEYVTEPIQAYIIPSGDAHQSEYIAPCD | 207. |
| | aminopeptidase 1 | | | CRRAFVSGFDGSAGTAIITEEHAAMWTDGRYFLQAAKQMDSNWTL | |
| | [Source:HGNC | | | MKMGLKDTPTQEDWLVSVLPEGSRVGVDPLIIPTDYWKKMAKVL | |
| | Symbol; Acc:HGNC: | | | RSAGHHLIPVKENLVDKIWTDRPERPCKPLLTLGLDYTGISWKDKV | |
| | 12822] | | | ADLRLKMAERNVMWFVVTALDEIAWLFNLRGSDVEHNPVFFSYAI | |
| | | | | IGLETIMLFIDGDRIDAPSVKEHLLLDLGLEAEYRIQVHPYKSILSEL | |
| | | | | KALCADLSPREKVWVSDKASYAVSETIP | |
| XPNPEP1 | X-prolyl | 7511 | 553 | MWTDGRYFLQAAKQMDSNWTLMKMGLKDTPTQEDWLVSVLPEG | 208. |
| | aminopeptidase 1 | | | SRVGVDPLIIPTDYWKKMAKVLRSAGHHLIPVKENLVDKIWTDRPE | |
| | [Source:HGNC | | | RPCKPLLTLGLDYTGISWKDKVADLRLKMAERNVMWFVVTALDEI | |
| | Symbol; Acc:HGNC: | | | AWLFNLRGSDVEHNPVFFSYAIIGLETIMLFIDGDRIDAPSVKEHLLL | |
| | 12822] | | | DLGLEAEYRIQVHPYKSILSELKALCADLSPREKVWVSDKASYAVS | |
| | | | | ETIPKDHRCCMPYTPICIAKAVKNSAESEGMRRAHIKDAVALCELF | |
| | | | | NWLEKEVPKGGVTEISAADKAEEFRRQQADFVDLSFPTISSTGPNG | |
| | | | | AIIHYAPVPETNRTLSLDEVYLIDSGAQYKDGTTDVTRTMHFGTPTA | |
| | | | | YEKECFTYVLKGHIAVSAAVFPTGTKGHLLDSFARSALWDSGLDYL | |
| | | | | HGTGHGVGSFLNVHEGPCGISYKTFSDEPLEAGMIVTDEPGYYEDG | |
| | | | | AFGIRIENVVLVVPVKTKYNFNNRGSLTFEPLTLVPIQTKMIDVDSL | |
| | | | | TDKECDWLNNYHLTCRDVIGKELQKQGRQEALEWLIRETQPISKQ | |
| | | | | H* | |
| XPNPEP1 | X-prolyl | 7511 | 667 | MAASRKPPRVRVNHQDFQLRNLRIIEPNEVTHSGDTGVETDGRMPP | 209. |
| | aminopeptidase 1 | | | KVTSELLRQLRQAMRNSEYVTEPIQAYIIPSGDAHQSEYIAPCDCRR | |
| | [Source:HGNC | | | AFVSGFDGSAGTAIITEEHAAMWTDGRYFLQAAKQMDSNWTLMK | |
| | Symbol; Acc:HGNC: | | | MGLKDTPTQEDWLVSVLPEGSRVGVDPLIIPTDYWKKMAKVLRSA | |
| | 12822] | | | GHHLIPVKENLVDKIWTDRPERPCKPLLTLGLDYTGISWKDKVADL | |
| | | | | RLKMAERNVMWFVVTALDEIAWLFNLRGSDVEHNPVFFSYAIIGLE | |
| | | | | TIMLFIDGDRIDAPSVKEHLLLDLGLEAEYRIQVHPYKSILSELKALC | |
| | | | | ADLSPREKVWVSDKASYAVSETIPKDHRCCMPYTPICIAKAVKNSA | |
| | | | | ESEGMRRAHIKDAVALCELFNWLEKEVPKGGVTEISAADKAEEFRR | |
| | | | | QQADFVDLSFPTISSTGPNGAIIHYAPVPETNRTLSLDEVYLIDSGAQ | |
| | | | | YKDGTTDVTRTMHFGTPTAYEKECFTYVLKGHIAVSAAVFPTGTK | |
| | | | | GHLLDSFARSALWDSGLDYLHGTGHGVGSFLNVHEGPCGISYKTFS | |
| | | | | DEPLEAGMIVTDEPGYYEDGAFGIRIENVVLVVPVKTKYNFNNRGS | |
| | | | | LTFEPLTLVPIQTKMIDVDSLTDKECDWLNNYHLTCRDVIGKELQK | |
| | | | | QGRQEALEWLIRETQPISKQH* | |
| XPNPEP1 | X-prolyl | 7511 | 233 | MPPKVTSELLRQLRQAMRNSEYVTEPIQAYIIPSGDAHQSEYIAPCD | 210. |
| | aminopeptidase 1 | | | CRRAFVSGFDGSAGTAIITEEHAAMWTDGRYFLQAAKQMDSNWTL | |
| | [Source:HGNC | | | MKMGLKDTPTQEDWLVSVLPEGSRVGVDPLIIPTDYWKKMAKVL | |
| | Symbol; Acc:HGNC: | | | RSAGHHLIPVKENLVDKIWTDRPERPCKPLLTLGLDYTGLFNLRGS | |
| | 12822] | | | DVEHNPVFFSYAIIGLETIMLFIDGDRIDAPSVKEHLLLDLGLEAEYR | |
| | | | | IQV | |
| PRKCE | protein kinase C epsilon | 5581 | 738 | MVVFNGLLKIKICEAVSLKPTAWSLRHAVGPRPQTFLLDPYIALNV | 211. |
| | [Source:HGNC | | | DDSRIGQTATKQKTNSPAWHDEFVTDVCNGRKIELAVFHDAPIGYD | |
| | Symbol; Acc:HGNC: | | | DFVANCTIQFEELLQNGSRHFEDWIDLEPEGRVYVIIDLSGSSGEAP | |
| | 9401] | | | KDNEERVFRERMRPRKRQGAVRRRVHQVNGHKFMATYLRQPTYC | |
| | | | | SHCRDFIWGVIGKQGYQCQVCTCVVHKRCHELIITKCAGLKKQETP | |
| | | | | DQVGSQRFSVNMPHKFGIHNYKVPTFCDHCGSLLWGLLRQGLQCK | |
| | | | | VCKMNVHRRCETNVAPNCGVDARGIAKVLADLGVTPDKITNSGQR | |
| | | | | RKKLIAGAESPQPASGSSPSEEDRSKSAPTSPCDQEIKELENNIRKAL | |
| | | | | SFDNRGEEHRAASSPDGQLMSPGENGEVRQGQAKRLGLDEFNFIKV | |
| | | | | LGKGSFGKVMLAELKGKDEVYAVKVLKKDVILQDDDVDCTMTEK | |
| | | | | RILALARKHPYLTQLYCCFQTKDRLFFVMEYVNGGDLMFQIQRSRK | |
| | | | | FDEPRSRFYAAEVTSALMFLHQHGVIYRDLKLDNILLDAEGHCKLA | |
| | | | | DFGMCKEGILNGVTTTTFCGTPDYIAPEILQELEYGPSVDWWALGV | |
| | | | | LMYEMMAGQPPFEADNEDDLFESILHDDVLYPVWLSKEAVSILKA | |
| | | | | FMTKNPHKRLGCVASQNGEDAIKQHPFFKEIDWVLLEQKKIKPPFK | |
| | | | | PRIKTKRDVNNFDQDFTREEPVLTLVDEAIVKQINQEEFKGFSYFGE | |
| | | | | DLMP* | |
| PRKCE | protein kinase C epsilon | 5581 | 220 | MNVHRRCETNVAPNCGVDARGIAKVLADLGVTPDKITNSGQRRKK | 212. |
| | [Source:HGNC | | | LIAGAESPQPASGSSPSEEDRSKSAPTSPCDQEIKELENNIRKALSFD | |
| | Symbol; Acc:HGNC: | | | NRGEEHRAASSPDGQLMSPGENGEVRQGQAKRLGLDEFNFIKVLG | |
| | 9401] | | | KGSFGKVMLAELKGKDEVYAVKVLKKDVILQDDDVDCTMTEKRI | |
| | | | | LALARKHPYLTQLYCCFQTKGTGFSIQGCACEGMREL* | |
| PRKCE | protein kinase C epsilon | 5581 | 127 | MVVFNGLLKIKICEAVSLKPTAWSLRHAVGPRPQTFLLDPYIALNV | 213. |
| | [Source:HGNC | | | DDSRIGQTATKQKTNSPAWHDEFVTDVCNGRKIELAVFHDAPIGYD | |
| | Symbol; Acc:HGNC: | | | DFVANCTIQFEELLQNGSRHFEDWIDLEPEGRVYV | |
| | 9401] | | | | |
| STAT2 | signal transducer and | 6773 | 852 | [sequence omitted] | 214. |
| | activator of | | | QEAALGSDDSKATMLFFHFLDQLNYECGRCSQDPESLLLQHNLRKF | |
| | transcription 2 | | | CRDIQPFSQDPTQLAEMIFNLLLEEKRILIQAQRAQLEQGEPVLETPV | |
| | [Source:HGNC | | | ESQQHEIESRILDLRAMMEKLVKSISQLKDQQDVFCFRYKIQAKGK | |
| | Symbol; Acc:HGNC: | | | TPSLDPHQTKEQKILQETLNELDKRRKEVLDASKALLGRLTTLIELL | |
| | 11363] | | | LPKLEEWKAQQQKACIRAPIDHGLEQLETWFTAGAKLLFHLRQLLK | |
| | | | | ELKGLSCLVSYQDDPLTKGVDLRNAQVTELLQRLLHRAFVVETQP | |
| | | | | CMPQTPHRPLILKTGSKFTVRTRLLVRLQEGNESLTVEVSIDRNPPQ | |
| | | | | LQGFRKFNILTSNQKTLTPEKGQSQGLIWDFGYLTLVEQRSGGSGK | |
| | | | | GSNKGPLGVTEELHIISFTVKYTYQGLKQELKTDTLPVVIISNMNQL | |
| | | | | SIAWASVLWFNLLSPNLQNQQFFSNPPKAPWSLLGPALSWQFSSYV | |
| | | | | GRGLNSDQLSMLRNKLFGQNCRTEDPLLSWADFTKRESPPGKLPF | |
| | | | | WTWLDKILELVHDHLKDLWNDGRIMGFVSRSQERRLLKKTMSGTF | |
| | | | | LLRFSESSEGGITCSWVEHQDDDKVLIYSVQPYTKEVLQSLPLTEIIR | |
| | | | | HYQLLTEENIPENPLRFLYPRIPRDEAFGCYYQEKVNLQERRKYLKH | |
| | | | | RLIVVSNRQVDELQQPLELKPEPELESLELELGLVPEPELSLDLEPLL | |
| | | | | KAGLDLGPELESVLESTLEPVIEPTLCMVSQTVPEPDQGPVSQPVPE | |
| | | | | PDLPCDLRHLNTEPMEIFRNCVKIEEIMPNGDPLLAGQNTVDEVYVS | |
| | | | | RPSHFYTDGPLMPSDF* | |
| STAT2 | signal transducer and | 6773 | 461 | [sequence omitted] | 215. |
| | activator of | | | QEAALGSDDSKATMLFFHFLDQLNYECGRCSQDPESLLLQHNLRKF | |
| | transcription 2 | | | CRDIQDPTQLAEMIFNLLLEEKRILIQAQRAQLEQGEPVLETPVESQ | |
| | [Source:HGNC | | | QHEIESRILDLRAMMEKLVKSISQLKDQQDVFCFRYKIQAKGKTPSL | |
| | Symbol; Acc:HGNC: | | | DPHQTKEQKILQETLNELDKRRKEVLDASKALLGRLTTLIELLLPKL | |
| | 11363] | | | EEWKAQQQKACIRAPIDHGLEQLETWFTAGAKLLFHLRQLLKELK | |
| | | | | GLSCLVSYQDDPLTKGVDLRNAQVTELLQRLLHRAFVVETQPCMP | |
| | | | | QTPHRPLILKTGSKFTVRTRLLVRLQEGNESLTVEVSIDRNPPQLQG | |
| | | | | FRKFNILTSNQKTLTPEKGQSQGLIWDFGYLTLVEQRSGGSGKGSN | |
| | | | | KGPLGVTEELHIISFTVKYTYQGLKQELKVSENGGQGERKQLWKK | |
| | | | | A* | |
| STAT2 | signal transducer and | 6773 | 204 | [sequence omitted] | 216. |
| | activator of | | | QEAALGSDDSKATMLFFHFLDQLNYECGRCSQDPESLLLQHNLRKF | |
| | transcription 2 | | | CRDIQPFSQDPTQLAEMIFNLLLEEKRILIQAQRAQLEQGEPVLETPV | |
| | [Source:HGNC | | | ESQQHEIESRILDLRAMMEKLVKSISQLKDQQDVFCFRYKIQAKGR | |
| | Symbol; Acc:HGNC: | | | KHIEGLEKDKCLLRSRSWK* | |
| | 11363] | | | | |
| STAT2 | signal transducer and | 6773 | 200 | [sequence omitted] | 217. |
| | activator of | | | QEAALGSDDSKATMLFFHFLDQLNYECGRCSQDPESLLLQHNLRKF | |
| | transcription 2 | | | CRDIQDPTQLAEMIFNLLLEEKRILIQAQRAQLEQGEPVLETPVESQ | |
| | [Source:HGNC | | | QHEIESRILDLRAMMEKLVKSISQLKDQQDVFCFRYKIQAKGRKHIE | |
| | Symbol; Acc:HGNC: | | | GLEKDKCLLRSRSWK* | |
| | 11363] | | | | |
| STAT2 | signal transducer and | 6773 | 66 | [sequence omitted] | 218. |
| | activator of | | | KLHLGVMIPRLPCYSSTSWIS* | |
| | transcription 2 | | | | |
| | [Source:HGNC | | | | |
| | Symbol; Acc:HGNC: | | | | |
| | 11363] | | | | |
| STAT2 | signal transducer and | 6773 | 819 | [sequence omitted] | 219. |
| | activator of | | | QEAALGSDDSKATMLFFHFLDQLNYECGRCSQDPESLLLQHNLRKF | |
| | transcription 2 | | | CRDIQPFSQDPTQLAEMIFNLLLEEKRILIQAQRAQLEQGEPVLETPV | |
| | [Source:HGNC | | | ESQQHEIESRILDLRAMMEKLVKSISQLKDQQDVFCFRYKIQAKGK | |
| | Symbol; Acc:HGNC: | | | TPSLDPHQTKEQKILQETLNELDKRRKEVLDASKALLGRLTTLIELL | |
| | 11363] | | | LPKLEEWKAQQQKACIRAPIDHGLEQLETWFTAGAKLLFHLRQLLK | |
| | | | | ELKGLSCLVSYQDDPLTKGVDLRNAQVTELLQRLLHRAFVVETQP | |
| | | | | CMPQTPHRPLILKTGSKFTVRTRLLVRLQEGNESLTVEVSIDRNPPQ | |
| | | | | LQGFRKFNILTSNQKTLTPEKGQSQGLIWDFGYLTLVEQRSGGSGK | |
| | | | | GSNKGPLGVTEELHIISFTVKYTYQGLKQELKNQQFFSNPPKAPWSL | |
| | | | | LGPALSWQFSSYVGRGLNSDQLSMLRNKLFGQNCRTEDPLLSWAD | |
| | | | | FTKRESPPGKLPFWTWLDKILELVHDHLKDLWNDGRIMGFVSRSQE | |
| | | | | RRLLKKTMSGTFLLRFSESSEGGITCSWVEHQDDDKVLIYSVQPYT | |
| | | | | KEVLQSLPLTEIIRHYQLLTEENIPENPLRFLYPRIPRDEAFGCYYQE | |
| | | | | KVNLQERRKYLKHRLIVVSNRQVDELQQPLELKPEPELESLELELGL | |
| | | | | VPEPELSLDLEPLLKAGLDLGPELESVLESTLEPVIEPTLCMVSQTVP | |
| | | | | EPDQGPVSQPVPEPDLPCDLRHLNTEPMEIFRNCVKIEEIMPNGDPL | |
| | | | | LAGQNTVDEVYVSRPSHFYTDGPLMPSDF* | |
| STAT2 | signal transducer and | 6773 | 848 | [sequence omitted] | 220. |
| | activator of | | | QEAALGSDDSKATMLFFHFLDQLNYECGRCSQDPESLLLQHNLRKF | |
| | transcription 2 | | | CRDIQDPTQLAEMIFNLLLEEKRILIQAQRAQLEQGEPVLETPVESQ | |
| | [Source:HGNC | | | QHEIESRILDLRAMMEKLVKSISQLKDQQDVFCFRYKIQAKGKTPSL | |
| | Symbol; Acc:HGNC:11 | | | DPHQTKEQKILQETLNELDKRRKEVLDASKALLGRLTTLIELLLPKL | |
| | 363] | | | EEWKAQQQKACIRAPIDHGLEQLETWFTAGAKLLFHLRQLLKELK | |
| | | | | GLSCLVSYQDDPLTKGVDLRNAQVTELLQRLLHRAFVVETQPCMP | |
| | | | | QTPHRPLILKTGSKFTVRTRLLVRLQEGNESLTVEVSIDRNPPQLQG | |
| | | | | FRKFNILTSNQKTLTPEKGQSQGLIWDFGYLTLVEQRSGGSGKGSN | |
| | | | | KGPLGVTEELHIISFTVKYTYQGLKQELKTDTLPVVIISNMNQLSIA | |
| | | | | WASVLWFNLLSPNLQNQQFFSNPPKAPWSLLGPALSWQFSSYVGR | |
| | | | | GLNSDQLSMLRNKLFGQNCRTEDPLLSWADFTKRESPPGKLPFWT | |
| | | | | WLDKILELVHDHLKDLWNDGRIMGFVSRSQERRLLKKTMSGTFLL | |
| | | | | RFSESSEGGITCSWVEHQDDDKVLIYSVQPYTKEVLQSLPLTEIIRHY | |
| | | | | QLLTEENIPENPLRFLYPRIPRDEAFGCYYQEKVNLQERRKYLKHRL | |
| | | | | IVVSNRQVDELQQPLELKPEPELESLELELGLVPEPELSLDLEPLLKA | |
| | | | | GLDLGPELESVLESTLEPVIEPTLCMVSQTVPEPDQGPVSQPVPEPDL | |
| | | | | PCDLRHLNTEPMEIFRNCVKIEEIMPNGDPLLAGQNTVDEVYVSRPS | |
| | | | | HFYTDGPLMPSDF* | |
| STAT2 | signal transducer and | 6773 | 262 | [sequence omitted] | 221. |
| | activator of | | | QEAALGSDDSKATMLFFHFLDQLNYECGRCSQDPESLLLQHNLRKF | |
| | transcription 2 | | | CRDIQPFSQDPTQLAEMIFNLLLEEKRILIQAQRAQLEQGEPVLETPV | |
| | [Source:HGNC | | | ESQQHEIESRILDLRAMMEKLVKSISQLKDQQDVFCFRYKIQAKGK | |
| | Symbol; Acc:HGNC: | | | TPSLDPHQTKEQKILQETLNELDKRRKEVLDASKALLGRLTTLIELL | |
| | 11363] | | | LPKLEEWKAQQQKACIRAPIDHGLEQLETW* | |
| SPI1 | Spi-1 proto-oncogene | 6688 | 272 | MLQACKMEGFPLVPPQPSEDLVPYDTDLYQRQTHEYYPYLSSDGES | 222. |
| | [Source:HGNC | | | HSDHYWDFHPHHVHSEFESFAENNFTELQSVQPPQLQQLYRHMEL | |
| | Symbol; Acc:HGNC: | | | EQMHVLDTPMVPPHPSLGHQVSYLPRMCLQYPSLSPAQPSSDEEEG | |
| | 11241] | | | ERQSPPLEVSDGEADGLEPGPGLLPGETGSKKKIRLYQFLLDLLRSG | |
| | | | | DMKDSIWWVDKDKGTFQFSSKHKEALAHRWGIQKGNRKKMTYQ | |
| | | | | KMARALRNYGKTGEVKKVKKKLTYQFSGEVLGRGGLAERRHPPH | |
| | | | | * | |
| SPI1 | Spi-1 proto-oncogene | 6688 | 271 | MLQACKMEGFPLVPPPSEDLVPYDTDLYQRQTHEYYPYLSSDGESH | 223. |
| | [Source HGNC | | | SDHYWDFHPHHVHSEFESFAENNFTELQSVQPPQLQQLYRHMELE | |
| | Symbol; Acc:HGNC: | | | QMHVLDTPMVPPHPSLGHQVSYLPRMCLQYPSLSPAQPSSDEEEGE | |
| | 11241] | | | RQSPPLEVSDGEADGLEPGPGLLPGETGSKKKIRLYQFLLDLLRSGD | |
| | | | | MKDSIWWVDKDKGTFQFSSKHKEALAHRWGIQKGNRKKMTYQK | |
| | | | | MARALRNYGKTGEVKKVKKKLTYQFSGEVLGRGGLAERRHPPH* | |
| SPI1 | Spi-1 proto-oncogene | 6688 | 36 | MLQACKMEGFPLVPPAARRRSACTSSCWTCSAAAT* | 224. |
| | [Source:HGNC | | | | |
| | Symbol; Acc:HGNC: | | | | |
| | 11241] | | | | |
| SPI1 | Spi-1 proto-oncogene | 6688 | 246 | MLQACKMEGFPLVPPPSEDLVPYDTDLYQRQTHEYYPYLSSDGESH | 225. |
| | [Source:HGNC | | | SDHYWDFHPHHVHSEFESFAENNFTELQSVQPPQLQQLYRHMELE | |
| | Symbol; Acc:HGNC: | | | QMHVLDTPMVPPHPSLGHQVSYLPRMCLQYPSLSPAQPSSDEEEGE | |
| | 11241] | | | RQSPPLEVSDGEADGLEPGPGLLPGETGGAPGPPPWPRPWPCLCPAP | |
| | | | | TQPGQLTQQPRHRVACVCVCMFASVCVLWGCLWLSLCVCICCVV | |
| | | | | HTGISMKCARCVCLSVP* | |
| SLC37A3 | solute carrier family 37 | 84255 | 495 | MAWPNVFQRGSLLSQFSHHHVVVFLLTFFSYSLLHASRKTFSNVKV | 226. |
| | member 3 | | | SISEQWTPSAFNTSVELPVEIWSSNHLFPSAEKATLFLGTLDTIFLFSY | |
| | [Source:HGNC | | | AVGLFISGIVGDRLNLRWVLSFGMCSSALVVFVFGALTEWLRFYNK | |
| | Symbol; Acc:HGNC: | | | WLYCCLWIVNGLLQSTGWPCVVAVMGNWFGKAGRGVVFGLWSA | |
| | 20651] | | | CASVGNILGACLASSVLQYGYEYAFLVTASVQFAGGIVIFFGLLVSP | |
| | | | | EEIGLSGIEAEENFEEDSHRPLINGGENEDEYEPNYSIQDDSSVAQVK | |
| | | | | AISFYQACCLPGVIPYSLAYACLKLVNYSFFFWLPFYLSNNFGWKE | |
| | | | | AEADKLSIWYDVGGIIGGTLQGFISDVLQKRAPVLALSLLLAVGSLI | |
| | | | | GYSRSPNDKSINALLMTVTGFFIGGPSNMISSAISADLGRQELIQRSS | |
| | | | | EALATVTGIVDGSGSIGAAVGQYLVSLIRDKLGWMWVFYFFILMTS | |
| | | | | CTIVFISPLIVREIFSLVLRRQAHILRE* | |
| SLC37A3 | solute carrier family 37 | 84255 | 444 | MAWPNVFQRGSLLSQFSHHHVVVFLLTFFSYSLLHASRKTFSNVKV | 227. |
| | member 3 | | | SISEQWTPSAFNTSVELPVEIWSSNHLFPSAEKATLFLGTLDTIFLFSY | |
| | [Source:HGNC | | | AVGLFISGIVGDRLNLRWVLSFGMCSSALVVFVFGALTEWLRFYNK | |
| | Symbol; Acc:HGNC: | | | WLYCCLWIVNGLLQSTGWPCVVAVMGNWFGKAGRGVVFGLWSA | |
| | 20651] | | | CASVGNILGACLASSVLQYGYEYAFLVTASVQFAGGIVIFFGLLVSP | |
| | | | | EEIGLSGIEAEENFEEDSHRPLINGGENEDEYEPNYSIQDDSSVAQVK | |
| | | | | AISFYQACCLPGVIPYSLAYACLKLVNYSFFFWLPFYLSNNFGWKE | |
| | | | | AEADKLSIWYDVGGIIVFSVSDPGQARMDVGFLLFHSHDKLYNCV | |
| | | | | YLAINSEGNILSRAKETGSHIEGVTGARETERTMSATSGPLGLRVCP | |
| | | | | NLGLSRSSSLILDCQASLNTASHLRC* | |
| SLC37A3 | solute carrier family 37 | 84255 | 126 | GLFISGIVGDRLNLRWVLSFGMCSSALVVFVFGALTEWLRFYNKW | 228. |
| | member 3 | | | LYCCLWIVNGLLQSTGWPCVVAVMGNWFGKAGRGVVFGLWSAC | |
| | [Source:HGNC | | | ASVGNILGACLASSVLQYGYEICKDHLSPLSSSMPFW* | |
| | Symbol; Acc:HGNC: | | | | |
| | 20651] | | | | |
| SLC37A3 | solute carrier family 37 | 84255 | 67 | MAWPNVFQRGSLLSQFSHHHVVVFLLTFFSYSLLHASRKTFSNVKV | 229. |
| | member 3 | | | SISEQWTPSAFNTSVELPVE* | |
| | [Source:HGNC | | | | |
| | Symbol; Acc:HGNC: | | | | |
| | 20651] | | | | |
| SLC37A3 | solute carrier family 37 | 84255 | 57 | QRSSEALATVTGIVDGSGSIGAAVGQTSCTIVFISPLIVREIFSLVLRR | 230. |
| | member 3 | | | QAHILRE* | |
| | [Source:HGNC | | | | |
| | Symbol; Acc:HGNC: | | | | |
| | 20651] | | | | |
| SLC37A3 | solute carrier family 37 | 84255 | 151 | XLLLAVGSLIGYSRSPNDKSINALLMTVTGFFIGGPSNMISSAISADL | 231. |
| | member 3 | | | GRQELIQRSSEALATVTGIVDGSGSIGAAVGQYLVSLIRDKLGWMW | |
| | [Source:HGNC | | | VFYFFILMTGSHIEGVTGARETERTMSATSGPLGLRVCPNLGLSRSS | |
| | Symbol; Acc:HGNC: | | | SLILDCQASL | |
| | 20651] | | | | |
| SLC37A3 | solute carrier family 37 | 84255 | 178 | XAEKATLFLGTLDTIFLFSYAVGLFISGIVGDRLNLRWVLSFGMCSS | 232. |
| | member 3 | | | ALVVFVFGALTEWLRFYNKWLYCCLWIVNGLLQSTGWPCVVAVM | |
| | [Source:HGNC | | | GNWFGKAGRGVVFGLWSACASVGNILGACLASSVLQYGYEYSLA | |
| | Symbol; Acc:HGNC: | | | YACLKLVNYSFFFWLPFYLSNNFGWKEAEADKLSIWYDVGGII | |
| | 20651] | | | | |
| SLC37A3 | solute carrier family 37 | 84255 | 99 | XSAISADLGRQELIQRSSEALATVTGIVDGSGSIGAAVGQETGSHIEG | 233. |
| | member 3 | | | VTGARETERTMSATSGPLGLRVCPNLGLSRSSSLILDCQASLNTASH | |
| | [Source:HGNC | | | LRC* | |
| | Symbol; Acc:HGNC: | | | | |
| | 20651] | | | | |
| SLC37A3 | solute carrier family 37 | 84255 | 162 | LSLLLAVGSLIGYSRSPNDKSINALLMTVTGFFIGGPSNMISSAISAD | 234. |
| | member 3 | | | LGRQELIQRSSEALATVTGIVDGSGSIGAAVGQYLVSLIRDKLGWM | |
| | [Source:HGNC | | | WVFYFFILMETGSHIEGVTGARETERTMSATSGPLGLRVCPNLGLSR | |
| | Symbol; Acc:HGNC: | | | SSSLILDCQASLNTASHLRC* | |
| | 20651] | | | | |
| SLC37A3 | solute carrier family 37 | 84255 | 225 | MAWPNVFQRGSLLSQFSHHHVVVFLLTFFSYSLLHASRKTFSNVKV | 235. |
| | member 3 | | | SISEQWTPSAFNTSVELPVEIWSSNHLFPSAEKATLFLGTLDTIFLFSY | |
| | [Source:HGNC | | | AVGLFISGIVGDRLNLRWVLSFGMCSSALVVFVFGALTEWLRFYNK | |
| | Symbol; Acc:HGNC: | | | WLYCCLWIVNGLLQSTGWPCVVAVMGNWFGKAGRGVVFGLWSA | |
| | 20651] | | | CASVGNILGACLASSVLQYGYEVSRVLRQKKTLKKTHTGH* | |
| SLC37A3 | solute carrier family 37 | 84255 | 193 | XIFFGLLVSPEEIGLSGIEAEENFEEDSHRPLINGGENEDEYEPNYSIQ | 236. |
| | member 3 | | | DDSSVAQVKAISFYQACCLPGVIPYSLAYACLKLVNYSFFFWLPFYL | |
| | [Source:HGNC | | | SNNFGWKEAEADKLSIWYDVGGIIGGTLQGFISDVLQKRAPVLALS | |
| | Symbol; Acc:HGNC: | | | LLLAVGSLIGYSLFSVSDPGQARMDVGFLLFHSHDKLYNCVYLAIN | |
| | 20651] | | | SEGNI | |
| SLC37A3 | solute carrier family 37 | 84255 | 55 | MAWPNVFQRGSLLSQFSHHHVVVFLLTFFRCLSLVRSQNGCVSTTN | 237. |
| | member 3 | | | GCTAACGL* | |
| | [Source:HGNC | | | | |
| | Symbol; Acc:HGNC: | | | | |
| | 20651] | | | | |
| SLC37A3 | solute carrier family 37 | 84255 | 123 | GWKEAEADKLSIWYDVGGIIVFSVSDPGQARMDVGFLLFHSHDKL | 238. |
| | member 3 | | | YNCVYLAINSEGNILSRAKETGSHIEGVTGARETERTMSATSGPLGL | |
| | [Source:HGNC | | | RVCPNLGLSRSSSLILDCQASLNTASHLRC* | |
| | Symbol; Acc:HGNC: | | | | |
| | 20651] | | | | |
| SLC37A3 | solute carrier family 37 | 84255 | 153 | MAWPNVFQRGSLLSQFSHHHVVVFLLTFFSYSLLHASRKTFSNVKV | 239. |
| | member 3 | | | SISEQWTPSAFNTSVELPVEIWSSNHLFPSAEKATLFLGTLDTIFLFSY | |
| | [Source:HGNC | | | AVGLFISGIVGDRLNLRWVLSFGMCSSALVYAFLVTASVQFAGGIVI | |
| | Symbol; Acc:HGNC: | | | FFGLLVSPEEI | |
| | 20651] | | | | |
| SLC37A3 | solute carrier family 37 | 84255 | 82 | XYSIQDDSSVAQVKAISFYQACCLPGVIPYLVSLIRDKLGWMWVFY | 240. |
| | member 3 | | | FFILMTSCTIVFISPLIVREIFSLVLRRQAHILRE* | |
| | [Source:HGNC | | | | |
| | Symbol; Acc:HGNC: | | | | |
| | 20651] | | | | |
| SLC37A3 | solute carrier family 37 | 84255 | 151 | XFPSAEKATLFLGTLDTIFLFSYAVGLFISGIVGDRLNLRWVLSFGM | 241. |
| | member 3 | | | CSSALVVFVFGALTEWLRFYNKWLYCCLWIVNGLLQSTGWPCVV | |
| | [Source:HGNC | | | AVMGNWFGKAGRGVVFGLWSACASVGNILGACLASSVLQYGYEI | |
| | Symbol; Acc:HGNC: | | | CKDHLSPLSSSMPFW* | |
| | 20651] | | | | |
| SLC37A3 | solute carrier family 37 | 84255 | 479 | MAWPNVFQRGSLLSQFSHHHVVVFLLTFFSYSLLHASRKTFSNVKV | 242. |
| | member 3 | | | SISEQWTPSAFNTSVELPVEIWSSNHLFPSAEKATLFLGTLDTIFLFSY | |
| | [Source:HGNC | | | AVGLFISGIVGDRLNLRWVLSFGMCSSALVVFVFGALTEWLRFYNK | |
| | Symbol; Acc:HGNC:20 | | | WLYCCLWIVNGLLQSTGWPCVVAVMGNWFGKAGRGVVFGLWSA | |
| | 651] | | | CASVGNILGACLASSVLQYGYEYAFLVTASVQFAGGIVIFFGLLVSP | |
| | | | | EEIGLSGIEAEENFEEDSHRPLINGGENEDEYEPNYSIQDDSSVAQVK | |
| | | | | AISFYQACCLPGVIPYSLAYACLKLVNYSFFFWLPFYLSNNFGWKE | |
| | | | | AEADKLSIWYDVGGIIGGTLQGFISDVLQKRAPVLALSLLLAVGSLI | |
| | | | | GYSRFFIGGPSNMISSAISADLGRQELIQRSSEALATVTGIVDGSGSIG | |
| | | | | AAVGQYLVSLIRDKLGWMWVFYFFILMTSCTIVFISPLIVREIFSLVL | |
| | | | | RRQAHILRE* | |
| SLC37A3 | solute carrier family 37 | 84255 | 14 | MAWPNVFQRGSLLS | 243. |
| | member 3 | | | | |
| | [Source:HGNC | | | | |
| | Symbol; Acc:HGNC: | | | | |
| | 20651] | | | | |
| IRF8 | interferon regulatory | 3394 | 427 | MCDRNGGRRLRQWLIEQIDSSMYPGLIWENEEKSMFRIPWKHAGK | 244. |
| | factors [Source:HGNC | | | QDYNQEVDASIFKAWAVFKGKFKEGDKAEPATWKTRLRCALNKS | |
| | Symbol; Acc:HGNC: | | | PDFEEVTDRSQLDISEPYKVYRIVPEEEQKCKLGVATAGCVNEVTE | |
| | 5358] | | | MECGRSEIDELIKEPSVDDYMGMIKRSPSPPEACRSQLLPDWWAQQ | |
| | | | | PSTGVPLVTGYTTYDAHHSAFSQMVISFYYGGKLVGQATTTCPEGC | |
| | | | | RLSLSQPGLPGTKLYGPEGLELVRFPPADAIPSERQRQVTRKLFGHL | |
| | | | | ERGVLLHSSRQGVFVKRLCQGRVFCSGNAVVCKGRPNKLERDEVV | |
| | | | | QVFDTSQFFRELQQFYNSQGRLPDGRVVLCFGEEFPDMAPLRSKLIL | |
| | | | | VQIEQLYVRQLAEEAGKSCGAGSVMQAPEEPPPDQVFRMFPDICAS | |
| | | | | HQRSFFRENQQITV* | |
| IRF8 | interferon regulatory | 3394 | 153 | XAWAVFKGKFKEGDKAEPATWKTRLRCALNKSPDFEEVTDRSQL | 245. |
| | factors [Source:HGNC | | | DISEPYKVYRIVPEEEQKCKLGVATAGCVNEVTEMECGRSEIDELIK | |
| | Symbol; Acc:HGNC: | | | ESCSSSITARAGFLTAGWCCALGKSFRIWPPCAPNSFSCRLSSCMSG | |
| | 5358] | | | NWQKRLGRAVEPAL* | |
| IRF8 | interferon regulatory | 3394 | 328 | MCDRNGGRRLRQWLIEQIDSSMYPGLIWENEEKSMFRIPWKHAGK | 246. |
| | factors [Source:HGNC | | | QDYNQEVDASIFKAWAVFKGKFKEGDKAEPATWKTRLRCALNKS | |
| | Symbol; Acc:HGNC: | | | PDFEEVTDRSQLDISEPYKVYRIVPEEEQKCKLGVATAGCVNEVTE | |
| | 5358] | | | MECGRSEIDELIKEPSVDDYMGMIKRSPSPPEACRSQLLPDWWAQQ | |
| | | | | PSTGVPLVTGYTTYDAHHSAFSQMVISFYYGGKLVGQATTTCPEGC | |
| | | | | RLSLSQPGLPGTKLYGPEGLELVRFPPADAIPSERQRQVTRKLFGHL | |
| | | | | ERGVLLHSSRQGVFVKRLCQGRVFCSGNAVVCKGRPNKLERDEVV | |
| | | | | QVFDTSQFF | |
| IRF8 | interferon regulatory | 3394 | 14 | MGASWWARPPPPAP | 247. |
| | factors [Source:HGNC | | | | |
| | Symbol; Acc:HGNC: | | | | |
| | 5358] | | | | |
| IRF8 | interferon regulatory | 3394 | 223 | MVISFYYGGKLVGQATTTCPEGCRLSLSQPGLPGTKLYGPEGLELV | 248. |
| | factors [Source:HGNC | | | RFPPADAIPSERQRQVTRKLFGHLERGVLLHSSRQGVFVKRLCQGR | |
| | Symbol; Acc:HGNC: | | | VFCSGNAVVCKGRPNKLERDEVVQVFDTSQFFRELQQFYNSQGRL | |
| | 5358] | | | PDGRVVLCFGEEFPDMAPLRSKLILVQIEQLYVRQLAEEAGKSCGA | |
| | | | | GSVMQAPEEPPPDQVFRMFPDICASHQRSFFRENQQITV* | |
| IRF8 | interferon regulatory | 3394 | 159 | MCDRNGGRRLRQWLIEQIDSSMYPGLIWENEEKSMFRIPWKHAGK | 249. |
| | factors [Source:HGNC | | | QDYNQEVDASIFKAWAVFKGKFKEGDKAEPATWKTRLRCALNKS | |
| | Symbol; Acc:HGNC: | | | PDFEEVTDRSQLDISEPYKVYRIVPEEEQKCKLGVATAGCVNEVTE | |
| | 5358] | | | MECGRSEIDELIKEPSVDDYMGMI | |
| IRF8 | interferon regulatory | 3394 | 220 | MVISFYYGGKLVGQATTTCPEGCRLSLSQPGLPGTKLYGPEGLELV | 250. |
| | factors [Source:HGNC | | | RFPPADAIPSERQRQVTRKLFGHLERGVLLHSSRQGVFVKRLCQGR | |
| | Symbol; Acc:HGNC: | | | VFCSGNAVVCKGRPNKLERDEVVQVFDTSQFFRELQQFYNSQGRL | |
| | 5358] | | | PDGRVVLCFGEEFPDMAPLRSKLILVQIEQLYVRQLAEEAGKSCGA | |
| | | | | GSVMQAPEEPPPDQVFRMFPDICASHQRSFFRENQQI | |
| IRF8 | interferon regulatory | 3394 | 47 | MCDRNGGRRLRQWLIEQIDSSMYPGLIWENEEKSMFRIPWKHAGK | 251. |
| | factors [Source:HGNC | | | QD | |
| | Symbol; Acc:HGNC: | | | | |
| | 5358] | | | | |
| IRF8 | interferon regulatory | 3394 | 127 | MCDRNGGRRLRQWLIEQIDSSMYPGLIWENEEKSMFRIPWKHAGK | 252. |
| | factors [Source:HGNC | | | QDYNQEVDASIFKAWAVFKGKFKEGDKAEPATWKTRLRCALNKS | |
| | Symbol; Acc:HGNC: | | | PDFEEVTDRSQLDISEPYKVYRIVPEEEQKCNYPLWA* | |
| | 5358] | | | | |
| NPRL2 | NPR2 like, GATOR1 | 10641 | 381 | MGSGCRIECIFFSEFHPTLGPKITYQVPEDFISRELFDTVQVYIITKPEL | 253. |
| | complex subunit | | | QNKLITVTAMEKKLIGCPVCIEHKKYSRNALLFNLGFVCDAQAKTC | |
| | [Source:HGNC | | | ALEPIVKKLAGYLTTLELESSFVSMEESKQKLVPIMTILLEELNASGR | |
| | Symbol; Acc:HGNC: | | | CTLPIDESNTIHLKVIEQRPDPPVAQEYDVPVFTKDKEDFFNSQWDL | |
| | 24969] | | | TTQQILPYIDGFRHIQKISAEADVELNLVRIAIQNLLYYGVVTLVSIL | |
| | | | | QYSNVYCPTPKVQDLVDDKSLQEACLSYVTKQGHKRASLRDVFQL | |
| | | | | YCSLSPGTTVRDLIGRHPQQLQHVDERKLIQFGLMKNLIRRLQKYP | |
| | | | | VRVTREEQSHPARLYTGCHSYDEICCKTGMSYHELDERLENDPNIII | |
| | | | | CWK* | |
| NPRL2 | NPR2 like, GATOR1 | 10641 | 58 | MGSGCRIECIFFSEFHPTLGPKITYQVPEDFISRELFDTVQVYIITKPEL | 254. |
| | complex subunit | | | QNKLITV* | |
| | [Source HGNC | | | | |
| | Symbol; Acc:HGNC: | | | | |
| | 24969] | | | | |
| NPRL2 | NPR2 like, GATOR1 | 10641 | 88 | MGSGCRIECIFFSEFHPTLGPKITYQVPEDFISRELFDTVQVYIITKPEL | 255. |
| | complex subunit | | | QNKLITVYGKEADRLSCVHRTQEVQPQCSPLQPGLRV* | |
| | [Source:HGNC | | | | |
| | Symbol; Acc:HGNC: | | | | |
| | 24969] | | | | |
| NPRL2 | NPR2 like, GATOR1 | 10641 | 131 | MGSGCRIECIFFSEFHPTLGPKITYQVPEDFISRELFDTVQVYIITKPEL | 256. |
| | complex subunit | | | QNKLITVTAMEKKLIGCPVCIEHKKYSRNALLFNLGFVCDAQAKTC | |
| | [Source:HGNC | | | ALEPIVKKLAGYLTTLERAASCPWRRASRSWCPS* | |
| | Symbol; Acc:HGNC: | | | | |
| | 24969] | | | | |
| CDK5 | cyclin dependent kinase | 1020 | 261 | MQKYEKLEKIGEGTYGTVFKAKNRETHEIVALKRVRLDDDDEGVP | 257. |
| | 5 [Source:HGNC | | | SSALREICLLKELKHKNIVRLHDVLHSDKKLTLVFEFCDQDLKKYF | |
| | Symbol; Acc:HGNC: | | | DSCNGDLDPEIVKNGELKLADFGLARAFGIPVRCYSAEVVTLWYRP | |
| | 1774] | | | PDVLFGAKLYSTSIDMWSAGCIFAELANAGRPLFPGNDVDDQLKRI | |
| | | | | FRLLGTPTEEQWPSMTKLPDYKPYPMYPATTSLVNVVPKLNATGR | |
| | | | | DLLQNLLKCNPVQRISAEEALQHPYFSDFCPP* | |
| CDK5 | cyclin dependent kinase | 1020 | 293 | MQKYEKLEKIGEGTYGTVFKAKNRETHEIVALKRVRLDDDDEGVP | 258. |
| | 5 [Somce:HGNC | | | SSALREICLLKELKHKNIVRLHDVLHSDKKLTLVFEFCDQDLKKYF | |
| | Symbol; Acc:HGNC: | | | DSCNGDLDPEIVKSFLFQLLKGLGFCHSRNVLHRDLKPQNLLINRN | |
| | 1774] | | | GELKLADFGLARAFGIPVRCYSAEVVTLWYRPPDVLFGAKLYSTSI | |
| | | | | DMWSAGCIFAELANAGRPLFPGNDVDDQLKRIFRLLGTPTEEQWPS | |
| | | | | MTKLPDYKPYPMYPATTSLVNVVPKLNATGRDLLQNLLKCNPVQR | |
| | | | | ISAEEALQHPYFSDFCPP* | |
| ZC3H12A | zinc finger CCCH-type | 80149 | 600 | MSGPCGEKPVLEASPTMSLWEFEDSHSRQGTPRPGQELAAEEASAL | 259. |
| | containing 12A | | | ELQMKVDFFRKLGYSSTEIHSVLQKLGVQADTNTVLGELVKHGTA | |
| | [Source:HGNC | | | TERERQTSPDPCPQLPLVPRGGGTPKAPNLEPPLPEEEKEGSDLRPV | |
| | Symbol; Acc:HGNC: | | | VIDGSNVAMSHGNKEVFSCRGILLAVNWFLERGHTDITVFVPSWRK | |
| | 26259] | | | EQPRPDVPITDQHILRELEKKKILVFTPSRRVGGKRVVCYDDRFIVK | |
| | | | | LAYESDGIVVSNDTYRDLQGERQEWKRFIEERLLMYSFVNDKFMPP | |
| | | | | DDPLGRHGPSLDNFLRKKPLTLEHRKQPCPYGRKCTYGIKCRFFHP | |
| | | | | ERPSCPQRSVADELRANALLSPPRAPSKDKNGRRPSPSSQSSSLLTES | |
| | | | | EQCSLDGKKLGAQASPGSRQEGLTQTYAPSGRSLAPSGGSGSSFGP | |
| | | | | TDWLPQTLDSLPYVSQDCLDSGIGSLESQMSELWGVRGGGPGEPGP | |
| | | | | PRAPYTGYSPYGSELPATAAFSAFGRAMGAGHFSVPADYPPAPPAF | |
| | | | | PPREYWSEPYPLPPPTSVLQEPPVQSPGAGRSPWGRAGSLAKEQAS | |
| | | | | VYTKLCGVFPPHLVEAVMGRFPQLLDPQQLAAEILSYKSQHPSE* | |
| ZC3H12A | zinc finger CCCH-type | 80149 | 131 | DDRFIVKLAYESDGIVVSNDTYRDLQGERQEWKRFIEERLLMYSFV | 260. |
| | containing 12A | | | NDKLAIGPFSAIRSPCMAPTSREFFAPSAGLCPLMTHWAGTGPAWT | |
| | [Source:HGNC | | | TSCVRSHSLWSTGSSRVPMVWNPACPPRPSSLLPFLSPV | |
| | Symbol; Acc:HGNC: | | | | |
| | 26259] | | | | |
| ZC3H12A | zinc finger CCCH-type | 80149 | 284 | MSGPCGEKPVLEASPTMSLWEFEDSHSRQGTPRPGQELAAEEASAL | 261. |
| | containing 12A | | | ELQMKVDFFRKLGYSSTEIHSVLQKLGVQADTNTVLGELVKHGTA | |
| | [Source:HGNC | | | TERERQTSPDPCPQLPLVPRGGGTPKAPNLEPPLPEEEKEGSDLRPV | |
| | Symbol; Acc:HGNC: | | | VIDGSNVAMSHGNKEVFSCRGILLAVNWFLERGHTDITVFVPSWRK | |
| | 26259] | | | EQPRPDVPITDQHILRELEKKKILVFTPSRRVGGKRVVCYDDRFIVK | |
| | | | | LAYESDGIVVSNDTYRDLQGERQEWKRFIEERLLMYSFVNDNKAC | |
| | | | | HRPLLSN* | |
| BICRA | BRD4 interacting | 29998 | 1561 | MDDEDGRCLLDVICDPQALNDFLHGSEKLDSDDLLDNPGEAQSAF | 262. |
| | chromatin remodeling | | | YEGPGLHVQEASGNHLNPEPNQPAPSVDLDFLEDDILGSPATGGGG | |
| | complex associated | | | GGSGGADQPCDILQQSLQEANITEQTLEAEAELDLGPFQLPTLQPAD | |
| | protein [Source:HGNC | | | GGAGPTGAGGAAAVAAGPQALFPGSTDLLGLQGPPTVLTHQALVP | |
| | Symbol; Acc:HGNC: | | | PQDVVNKALSVQPFLQPVGLGNVTLQPIPGLQGLPNGSPGGATAAT | |
| | 4332] (encoded by | | | LGLAPIQVVGQPVMALNTPTSQLLAKQVPVSGYLASAAGPSEPVTL | |
| | GLTSCR1 gene set | | | ASAGVSPQGAGLVIQKNLSAAVATTLNGNSVFGGAGAASAPTGTPS | |
| | forth in Table 1) | | | GQPLAVAPGLGSSPLVPAPNVILHRTPTPIQPKPAGVLPPKLYQLTPK | |
| | | | | PFAPAGATLTIQGEPGALPQQPKAPQNLTFMAAGKAGQNVVLSGFP | |
| | | | | APALQANVFKQPPATTTGAAPPQPPGALSKPMSVHLLNQGSSIVIPA | |
| | | | | QHMLPGQNQFLLPGAPAVQLPQQLSALPANVGGQILAAAAPHTGG | |
| | | | | QLIANPILTNQNLAGPLSLGPVLAPHSGAHSAHILSAAPIQVGQPALF | |
| | | | | QMPVSLAAGSLPTQSQPAPAGPAATTVLQGVTLPPSAVAMLNTPD | |
| | | | | GLVQPATPAAATGEAAPVLTVQPAPQAPPAVSTPLPLGLQQPQAQQ | |
| | | | | PPQAPTPQAAAPPQATTPQPSPGLASSPEKIVLGQPPSATPTAILTQD | |
| | | | | SLQMFLPQERSQQPLSAEGPHLSVPASVIVSAPPPAQDPAPATPVAK | |
| | | | | GAGLGPQAPDSQASPAPAPQIPAAAPLKGPGPSSSPSLPHQAPLGDS | |
| | | | | PHLPSPHPTRPPSRPPSRPQSVSRPPSEPPLHPCPPPQAPPTLPGIFVIQ | |
| | | | | NQLGVPPPASNPAPTAPGPPQPPLRPQSQPPEGPLPPAPHLPPSSTSSA | |
| | | | | VASSSETSSRLPAPTPSDFQLQFPPSQGPHKSPTPPPTLHLVPEPAAPP | |
| | | | | PPPPRTFQMVTTPFPALPQPKALLERFHQVPSGIILQNKAGGAPAAP | |
| | | | | QTSTSLGPLTSPAASVLVSGQAPSGTPTAPSHAPAPAPMAATGLPPL | |
| | | | | LPAENKAFASNLPTLNVAKAASSGPGKPSGLQYESKLSGLKKPPTL | |
| | | | | QPSKEACFLEHLHKHQGSVLHPDYKTAFPSFEDALHRLLPYHVYQG | |
| | | | | ALPSPSDYHKVDEEFETVSTQLLKRTQAMLNKYRLLLLEESRRVSP | |
| | | | | SAEMVMIDRMFIQEEKTTLALDKQLAKEKPDEYVSSSRSLGLPIAAS | |
| | | | | SEGHRLPGHGPLSSSAPGASTQPPPHLPTKLVIRHGGAGGSPSVTWA | |
| | | | | RASSSLSSSSSSSSAASSLDADEDGPMPSRNRPPIKTYEARSRIGLKL | |
| | | | | KIKQEAGLSKVVHNTALDPVHQPPPPPATLKVAEPPPRPPPPPPPTG | |
| | | | | QMNGTVDHPPPAAPERKPLGTAPHCPRLPLRKTYRENVGGPGAPE | |
| | | | | GTPAGRARGGSPAPLPAKVDEATSGLIRELAAVEDELYQRMLKGPP | |
| | | | | PEPAASAAQGTGDPDWEAPGLPPAKRRKSESPDVDQASFSSDSPQD | |
| | | | | DTLTEHLQSAIDSILNLQQAPGRTPAPSYPHAASAGTPASPPPLHRPE | |
| | | | | AYPPSSHNGGLGARTLTR* | |
| BICRA | BRD4 interacting | 29998 | 126 | MDDEDGRCLLDVICDPQALNDFLHGSEKLDSDDLLDNPGEAQSAF | 263. |
| | chromatin remodeling | | | YEGPGLHVQEASGNHLNPEPNQPAPSVDLDFLEDDILGSPATGGGG | |
| | complex associated | | | GGSGGADQPCDILQQSLQEANITEQTLEAEAELDL | |
| | protein [Source:HGNC | | | | |
| | Symbol; Acc:HGNC: | | | | |
| | 4332] (encoded by | | | | |
| | GLTSCR1 gene set | | | | |
| | forth in Table 1) | | | | |
| BICRA | BRD4 interacting | 29998 | 1319 | MALNTPTSQLLAKQVPVSGYLASAAGPSEPVTLASAGVSPQGAGL | 264. |
| | chromatin remodeling | | | VIQKNLSAAVATTLNGNSVFGGAGAASAPTGTPSGQPLAVAPGLGS | |
| | complex associated | | | SPLVPAPNVILHRTPTPIQPKPAGVLPPKLYQLTPKPFAPAGATLTIQ | |
| | protein [Source:HGNC | | | GEPGALPQQPKAPQNLTFMAAGKAGQNVVLSGFPAPALQANVFKQ | |
| | Symbol; Acc:HGNC: | | | PPATTTGAAPPQPPGALSKPMSVHLLNQGSSIVIPAQHMLPGQNQFL | |
| | 4332] (encoded by | | | LPGAPAVQLPQQLSALPANVGGQILAAAAPHTGGQLIANPILTNQN | |
| | GLTSCR1 gene set | | | LAGPLSLGPVLAPHSGAHSAHILSAAPIQVGQPALFQMPVSLAAGSL | |
| | forth in Table 1) | | | PTQSQPAPAGPAATTVLQGVTLPPSAVAMLNTPDGLVQPATPAAAT | |
| | | | | GEAAPVLTVQPAPQAPPAVSTPLPLGLQQPQAQQPPQAPTPQAAAP | |
| | | | | PQATTPQPSPGLASSPEKIVLGQPPSATPTAILTQDSLQMFLPQERSQ | |
| | | | | QPLSAEGPHLSVPASVIVSAPPPAQDPAPATPVAKGAGLGPQAPDSQ | |
| | | | | ASPAPAPQIPAAAPLKGPGPSSSPSLPHQAPLGDSPHLPSPHPTRPPSR | |
| | | | | PPSRPQSVSRPPSEPPLHPCPPPQAPPTLPGIFVIQNQLGVPPPASNPA | |
| | | | | PTAPGPPQPPLRPQSQPPEGPLPPAPHLPPSSTSSAVASSSETSSRLPA | |
| | | | | PTPSDFQLQFPPSQGPHKSPTPPPTLHLVPEPAAPPPPPPRTFQMVTTP | |
| | | | | FPALPQPKALLERFHQVPSGIILQNKAGGAPAAPQTSTSLGPLTSPAA | |
| | | | | SVLVSGQAPSGTPTAPSHAPAPAPMAATGLPPLLPAENKAFASNLPT | |
| | | | | LNVAKAASSGPGKPSGLQYESKLSGLKKPPTLQPSKEACFLEHLHK | |
| | | | | HQGSVLHPDYKTAFPSFEDALHRLLPYHVYQGALPSPSDYHKVDEE | |
| | | | | FETVSTQLLKRTQAMLNKYRLLLLEESRRVSPSAEMVMIDRMFIQE | |
| | | | | EKTTLALDKQLAKEKPDEYVSSSRSLGLPIAASSEGHRLPGHGPLSS | |
| | | | | SAPGASTQPPPHLPTKLVIRHGGAGGSPSVTWARASSSLSSSSSSSSA | |
| | | | | ASSLDADEDGPMPSRNRPPIKTYEARSRIGLKLKIKQEAGLSKVVHN | |
| | | | | TALDPVHQPPPPPATLKVAEPPPRPPPPPPPTGQMNGTVDHPPPAAP | |
| | | | | ERKPLGTAPHCPRLPLRKTYRENVGGPGAPEGTPAGRARGGSPAPL | |
| | | | | PAKVDEATSGLIRELAAVEDELYQRMLKGPPPEPAASAAQGTGDPD | |
| | | | | WEAPGLPPAKRRKSESPDVDQASFSSDSPQDDTLTEHLQSAIDSILN | |
| | | | | LQQAPGRTPAPSYPHAASAGTPASPPPLHRPEAYPPSSHNGGLGART | |
| | | | | LTR* | |
| CPSF7 | cleavage and | 79869 | 515 | MGRPESAGGGSRGPFEGGGRARRAGGIFLTLSILRTRDLPSGAMSE | 265. |
| | polyadenylation | | | GVDLIDIYADEEFNQDPEFNNTDQIDLYDDVLTATSQPSDDRSSSTE | |
| | specific factor 7 | | | PPPPVRQEPSPKPNNKTPAILYTYSGLRNRRAAVYVGSFSWWTTDQ | |
| | [Source:HGNC | | | QLIQVIRSIGVYDVVELKFAENRANGQSKGYAEVVVASENSVHKLL | |
| | Symbol; Acc:HGNC: | | | ELLPGKVLNGEKVDVRPATRQNLSQFEAQARKRECVRVPRGGIPPR | |
| | 30098] | | | AHSRDSSDSADGRATPSENLVPSSARVDKPPSVLPYFNRPPSALPLM | |
| | | | | GLPPPPIPPPPPLSSSFGVPPPPPGIHYQHLMPPPPRLPPHLAVPPPGAI | |
| | | | | PPALHLNPAFFPPPNATVGPPPDTYMKASAPYNHHGSRDSGPPPSTV | |
| | | | | SEAEFEDIMKRNRAISSSAISKAVSGASAGDYSDAIETLLTAIAVIKQ | |
| | | | | SRVANDERCRVLISSLKDCLHGIEAKSYSVGASGSSSRKRHRSRERS | |
| | | | | PSRSRESSRRHRDLLHNEDRHDDYFQERNREHERHRDRERDRHH* | |
| CPSF7 | cleavage and | 79869 | 472 | MSEGVDLIDIYADEEFNQDPEFNNTDQIDLYDDVLTATSQPSDDRSS | 266. |
| | polyadenylation | | | STEPPPPVRQEPSPKPNNKTPAILYTYSGLRNRRAAVYVGSFSWWT | |
| | specific factor 7 | | | TDQQLIQVIRSIGVYDVVELKFAENRANGQSKGYAEVVVASENSVH | |
| | [Source:HGNC | | | KLLELLPGKVLNGEKVDVRPATRQNLSQFEAQARKRECVRVPRGGI | |
| | Symbol; Acc:HGNC: | | | PPRAHSRDSSDSADGRATPSENLVPSSARVDKPPSVLPYFNRPPSAL | |
| | 30098] | | | PLMGLPPPPIPPPPPLSSSFGVPPPPPGIHYQHLMPPPPRLPPHLAVPPP | |
| | | | | GAIPPALHLNPAFFPPPNATVGPPPDTYMKASAPYNHHGSRDSGPPP | |
| | | | | STVSEAEFEDIMKRNRAISSSAISKAVSGASAGDYSDAIETLLTAIAV | |
| | | | | IKQSRVANDERCRVLISSLKDCLHGIEAKSYSVGASGSSSRKRHRSR | |
| | | | | ERSPSRSRESSRRHRDLLHNEDRHDDYFQERNREHERHRDRERDRH | |
| | | | | H* | |
| CPSF7 | cleavage and | 79869 | 146 | MSEGVDLIDIYADEEFNQDPEFNNTDQIDLYDDVLTATSQPSDDRSS | 267. |
| | polyadenylation | | | STEPPPPVRQEPSPKPNNKTPAILYTYSGLRNRRAAVYVGSFSWWT | |
| | specific factor 7 | | | TDQQLIQVIRSIGVYDVVELKFAENRANGQSKGYAEVVVASENSVH | |
| | [Source:HGNC | | | KLLELLP | |
| | Symbol; Acc:HGNC: | | | | |
| | 30098] | | | | |
| CPSF7 | cleavage and | 79869 | 205 | MSEGVDLIDIYADEEFNQDPEFNNTDQIDLYDDVLTATSQPSDDRSS | 268. |
| | polyadenylation | | | STEPPPPVRQEPSPKPNNKTPAILYTYSGLRNRRAAVYVGSFSWWT | |
| | specific factor 7 | | | TDQQLIQVIRSIGVYDVVELKFAENRANGQSKGYAEVVVASENSVH | |
| | [Source:HGNC | | | KLLELLPGKVLNGEKVDVRPATRQNLSQFEAQARKRIPPRAHSRDS | |
| | Symbol; Acc:HGNC: | | | SDSADGRATPSENLVPSSAR | |
| | 30098] | | | | |
| CPSF7 | cleavage and | 79869 | 463 | MSEGVDLIDIYADEEFNQDPEFNNTDQIDLYDDVLTATSQPSDDRSS | 269. |
| | polyadenylation | | | STEPPPPVRQEPSPKPNNKTPAILYTYSGLRNRRAAVYVGSFSWWT | |
| | specific factor 7 | | | TDQQLIQVIRSIGVYDVVELKFAENRANGQSKGYAEVVVASENSVH | |
| | [Source:HGNC | | | KLLELLPGKVLNGEKVDVRPATRQNLSQFEAQARKRIPPRAHSRDS | |
| | Symbol; Acc:HGNC: | | | SDSADGRATPSENLVPSSARVDKPPSVLPYFNRPPSALPLMGLPPPPI | |
| | 30098] | | | PPPPPLSSSFGVPPPPPGIHYQHLMPPPPRLPPHLAVPPPGAIPPALHL | |
| | | | | NPAFFPPPNATVGPPPDTYMKASAPYNHHGSRDSGPPPSTVSEAEFE | |
| | | | | DIMKRNRAISSSAISKAVSGASAGDYSDAIETLLTAIAVIKQSRVAN | |
| | | | | DERCRVLISSLKDCLHGIEAKSYSVGASGSSSRKRHRSRERSPSRSRE | |
| | | | | SSRRHRDLLHNEDRHDDYFQERNREHERHRDRERDRHH* | |
| CPSF7 | cleavage and | 79869 | 374 | MSEGVDLIDIYADEEFNQDPEFNNTDQIDLYDDVLTATSQPSDDRSS | 270. |
| | polyadenylation | | | STEPPPPVRQEPSPKPNNKTPAILYTYSGLRNRRAAVYVGSFSWWT | |
| | specific factor 7 | | | TDQQLIQVIRSIGVYDVVELKFAENRANGQSKGYAEVVVASENSVH | |
| | [Source:HGNC | | | KLLELLPGKVLNGEKVDVRPATRQNLSQFEAQARKRIPPRAHSRDS | |
| | Symbol; Acc:HGNC: | | | SDSADGRATPSENLVPSSARVDKPPSVLPYFNRPPSALPLMVGPPPD | |
| | 30098] | | | TYMKASAPYNHHGSRDSGPPPSTVSEAEFEDIMKRNRAISSSAISKA | |
| | | | | VSGASAGDYSDAIETLLTAIAVIKQSRVANDERCRVLISSLKDCLHG | |
| | | | | IEAKSYSVGASGSSSRKRHRSRERSPSRSRESSRRHRDLLHNEDRHD | |
| | | | | D | |
| CPSF7 | cleavage and | 79869 | 144 | MSEGVDLIDIYADEEFNQDPEFNNTDQIDLYDDVLTATSQPSDDRSS | 271. |
| | polyadenylation | | | STEPPPPVRQEPSPKPNNKTPAILYTYSGLRNRRAAVYVGSFSWWT | |
| | specific factor 7 | | | TDQQLIQVIRSIGVYDVVELKFAENRANGQSKGYAEVVVASENSVH | |
| | [Source:HGNC | | | KLLEL | |
| | Symbol; Acc:HGNC: | | | | |
| | 30098] | | | | |
| CPSF7 | cleavage and | 79869 | 138 | MSEGVDLIDIYADEEFNQDPEFNNTDQIDLYDDVLTATSQPSDDRSS | 272. |
| | polyadenylation | | | STEPPPPVRQEPSPKPNNKTPAILYTYSGLRNRRAAVYVGSFSWWT | |
| | specific factor 7 | | | TDQQLIQVIRSIGVYDVVELKFAENRANGQSKGYAEVVVASENSV | |
| | [Source:HGNC | | | | |
| | Symbol; Acc:HGNC: | | | | |
| | 30098] | | | | |
| CPSF7 | cleavage and | 79869 | 102 | MSEGVDLIDIYADEEFNQDPEFNNTDQIDLYDDVLTATSQPSDDRSS | 273. |
| | polyadenylation | | | STEPPPPVRQEPSPKPNNKTPAILYTYSGLRNRRAAVYVGSFSWVGL | |
| | specific factor 7 | | | ISERELS* | |
| | [Source:HGNC | | | | |
| | Symbol; Acc:HGNC: | | | | |
| | 30098] | | | | |
| CPSF7 | cleavage and | 79869 | 101 | MSEGVDLIDIYADEEFNQDPEFNNTDQIDLYDDVLTATSQPSDDRSS | 274. |
| | polyadenylation | | | STEPPPPVRQEPSPKPNNKTPAILYTYSGLRNRRAAVYVGSFSWGHL | |
| | specific factor 7 | | | RDEISE* | |
| | [Source:HGNC | | | | |
| | Symbol; Acc:HGNC: | | | | |
| | 30098] | | | | |
| CPSF7 | cleavage and | 79869 | 99 | MSEGVDLIDIYADEEFNQDPEFNNTDQIDLYDDVLTATSQPSDDRSS | 275. |
| | polyadenylation | | | STEPPPPVRQEPSPKPNNKTPAILYTYSGLRNRRAAVYVGSFSWESM | |
| | specific factor 7 | | | MWWS* | |
| | [Source:HGNC | | | | |
| | Symbol; Acc:HGNC: | | | | |
| | 30098] | | | | |
| CPSF7 | cleavage and | 79869 | 103 | MSEGVDLIDIYADEEFNQDPEFNNTDQIDLYDDVLTATSQPSDDRSS | 276. |
| | polyadenylation | | | STEPPPPVRQEPSPKPNNKTPAILYTYSGLRNRRAAVYVGSFSWWT | |
| | specific factor 7 | | | TDQQLIQVC* | |
| | [Source:HGNC | | | | |
| | Symbol; Acc:HGNC: | | | | |
| | 30098] | | | | |
| CPSF7 | cleavage and | 79869 | 94 | MSEGVDLIDIYADEEFNQDPEFNNTDQIDLYDDVLTATSQPSDDRSS | 277. |
| | polyadenylation | | | STEPPPPVRQEPSPKPNNKTPAILYTYSGLRNRRAAVYVGSFSWVC* | |
| | specific factor 7 | | | | |
| | [Source:HGNC | | | | |
| | Symbol; Acc:HGNC: | | | | |
| | 30098] | | | | |
| CPSF7 | cleavage and | 79869 | 288 | MSEGVDLIDIYADEEFNQDPEFNNTDQIDLYDDVLTATSQPSDDRSS | 278. |
| | polyadenylation | | | STEPPPPVRQEPSPKPNNKTPAILYTYSGLRNRRAAVYVGSFSWWT | |
| | specific factor 7 | | | TDQQLIQVIRSIGVYDVVELKFAENRANGQSKGYAEVVVASENSVH | |
| | [Source:HGNC | | | KLLELLPGKVLNGEKVDVRPATRQNLSQFEAQARKRIPPRAHSRDS | |
| | Symbol; Acc:HGNC: | | | SDSADGRATPSENLVPSSARVDKPPSVLPYFNRPPSALPLMGLPPPPI | |
| | 30098] | | | PPPPPLSSSFGVPPPPPGIHYQHLMPPPPRLPPHLAVPPPGAIPPALHL | |
| | | | | NPAFFP | |
| CPSF7 | cleavage and | 79869 | 102 | MSEGVDLIDIYADEEFNQDPEFNNTDQIDLYDDVLTATSQPSDDRSS | 279. |
| | polyadenylation | | | STEPPPPVRQEPSPKPNNKTPAILYTYSGLRNRRAAVYVGSFSWQG | |
| | specific factor 7 | | | HLRDEISE* | |
| | [Source:HGNC | | | | |
| | Symbol; Acc:HGNC: | | | | |
| | 30098] | | | | |
| CPSF7 | cleavage and | 79869 | 219 | MSEGVDLIDIYADEEFNQDPEFNNTDQIDLYDDVLTATSQPSDDRSS | 280. |
| | polyadenylation | | | STEPPPPVRQEPSPKPNNKTPAILYTYSGLRNRRAAVYVGSFSWWT | |
| | specific factor 7 | | | TDQQLIQVIRSIGVYDVVELKFAENRANGQSKGYAEVVVASENSVH | |
| | [Source:HGNC | | | KLLELLPGKVLNGEKVDVRPATRQNLSQFEAQARKRIPPRAHSRDS | |
| | Symbol; Acc:HGNC: | | | SDSADGRATPSENLVPSSARVDKPPSVLPYFNRP | |
| | 30098] | | | | |
| MTA2 | metastasis associated 1 | 9219 | 669 | MAANMYRVGDYVYFENSSSNPYLVRRIEELNKTANGNVEAKVVC | 281. |
| | family member 2 | | | LFRRRDISSSLNSLADSNAREFEEESKQPGVSEQQRHQLKHRELFLS | |
| | [Source:HGNC | | | RQFESLPATHIRGKCSVTLLNETDILSQYLEKEDCFFYSLVFDPVQK | |
| | Symbol; Acc:HGNC: | | | TLLADQGEIRVGCKYQAEIPDRLVEGESDNRNQQKMEMKVWDPD | |
| | 74H] | | | NPLTDRQIDQFLVVARAVGTFARALDCSSSIRQPSLHMSAAAASRDI | |
| | | | | TLFHAMDTLQRNGYDLAKAMSTLVPQGGPVLCRDEMEEWSASEA | |
| | | | | MLFEEALEKYGKDFNDIRQDFLPWKSLASIVQFYYMWKTTDRYIQ | |
| | | | | QKRLKAAEADSKLKQVYIPTYTKPNPNQIISVGSKPGMNGAGFQKG | |
| | | | | LTCESCHTTQSAQWYAWGPPNMQCRLCASCWIYWKKYGGLKTPT | |
| | | | | QLEGATRGTTEPHSRGHLSRPEAQSLSPYTTSANRAKLLAKNRQTF | |
| | | | | LLQTTKLTRLARRMCRDLLQPRRAARRPYAPINANAIKAECSIRLPK | |
| | | | | AAKTPLKIHPLVRLPLATIVKDLVAQAPLKPKTPRGTKTPINRNQLS | |
| | | | | QNRGLGGIMVKRAYETMAGAGVPFSANGRPLASGIRSSSQPAAKR | |
| | | | | QKLNPADAPNPVVFVATKDTRALRKALTHLEMRRAARRPNLPLKV | |
| | | | | KPTLIAVRPPVPLPAPSHPASTNEPIVLED* | |
| MTA2 | metastasis associated 1 | 9219 | 496 | MEMKVWDPDNPLTDRQIDQFLVVARAVGTFARALDCSSSIRQPSL | 282. |
| | family member 2 | | | HMSAAAASRDITLFHAMDTLQRNGYDLAKAMSTLVPQGGPVLCR | |
| | [Source:HGNC | | | DEMEEWSASEAMLFEEALEKYGKDFNDIRQDFLPWKSLASIVQFY | |
| | Symbol; Acc:HGNC: | | | YMWKTTDRYIQQKRLKAAEADSKLKQVYIPTYTKPNPNQIISVGSK | |
| | 7411] | | | PGMNGAGFQKGLTCESCHTTQSAQWYAWGPPNMQCRLCASCWIY | |
| | | | | WKKYGGLKTPTQLEGATRGTTEPHSRGHLSRPEAQSLSPYTTSANR | |
| | | | | AKLLAKNRQTFLLQTTKLTRLARRMCRDLLQPRRAARRPYAPINA | |
| | | | | NAIKAECSIRLPKAAKTPLKIHPLVRLPLATIVKDLVAQAPLKPKTPR | |
| | | | | GTKTPINRNQLSQNRGLGGIMVKRAYETMAGAGVPFSANGRPLAS | |
| | | | | GIRSSSQPAAKRQKLNPADAPNPVVFVATKDTRALRKALTHLEMR | |
| | | | | RAARRPNLPLKVKPTLIAVRPPVPLPAPSHPASTNEPIVLED* | |
| ACAT2 | acetyl-CoA | 39 | 398 | MNAGSDPVVIVSAARTIIGSFNGALAAVPVQDLGSTVIKEVLKRAT | 283. |
| | acetyltransferase 2 | | | VAPEDVSEVIFGHVLAAGCGQNPVRQASVGAGIPYSVPAWSCQMIC | |
| | [Source:HGNC | | | GSGLKAVCLAVQSIGIGDSSIVVAGGMENMSKAPHLAYLRTGVKIG | |
| | Symbol; Acc:HGNC: | | | EMPLTDSILCDGLTDAFHNCHMGITAENVAKKWQVSREDQDKVA | |
| | 94] | | | VLSQNRTENAQKAGHFDKEIVPVLVSTRKGLIEVKTDEFPRHGSNIE | |
| | | | | AMSKLKPYFLTDGTGTVTPANASGINDGAAAVVLMKKSEADKRGL | |
| | | | | TPLARIVSWSQVGVEPSIMGIGPIPAIKQAVTKAGWSLEDVDIFEINE | |
| | | | | AFAAVSAAIVKELGLNPEKVNIEGGAIALGHPLGASGCRILVTLLHT | |
| | | | | LERMGRSRGVAALCIGGGMGIAMCVQRE* | |
| FOXP1 | forkhead box P1 | 27086 | 567 | MMQESGTETKSNGSAIQNGSGGSNHLLECGGLREGRSNGETPAVDI | 284. |
| | [Source:HGNC | | | GAADLAHAQQQQQQALQVARQLLLQQQQQQQVSGLKSPKRNDK | |
| | Symbol; Acc:HGNC: | | | QPALQVPVSVAMMTPQVITPQQMQQILQQQVLSPQQLQVLLQQQQ | |
| | 3823] | | | ALMLQQQQLQEFYKKQQEQLQLQLLQQQHAGKQPKEQQQVATQQ | |
| | | | | LAFQQQLLQMQQLQQQHLLSLQRQGLLTIQPGQPALPLQPLAQGMI | |
| | | | | PTELQQLWKEVTSAHTAEETTGNNHSSLDLTTTCVSSSAPSKTSLIM | |
| | | | | NPHASTNGQLSVHTPKRESLSHEEHPHSHPLYGHGVCKWPGCEAV | |
| | | | | CEDFQSFLKHLNSEHALDDRSTAQCRVQMQVVQQLELQLAKDKER | |
| | | | | LQAMMTHLHVKSTEPKAAPQPLNLVSSVTLSKSASEASPQSLPHTP | |
| | | | | TTPTAPLTPVTQGPSVITTTSMHTVGPIRRRYSDKYNVPISSADIAQN | |
| | | | | QEFYKNAEVRPPFTYASLIRQAILESPEKQLTLNEIYNWFTRMFAYF | |
| | | | | RRNAATWKNAVRHNLSLHKCFVRVENVKGAVWTVDEVEFQKRRP | |
| | | | | QKISGVPFAPTSHCISALSE* | |
| FOXP1 | forkhead box P1 | 27086 | 115 | MMQESGTETKSNGSAIQNGSGGSNHLLECGGLREGRSNGETPAVDI | 285. |
| | [Source:HGNC | | | GAADLAHAQQQQQQWHLINHQPSRSPSSWLKRLISSPWELEVLQV | |
| | Symbol; Acc:HGNC: | | | PLWGAVAETKMSGPVCQPNPSPF* | |
| | 3823] | | | | |
| FOXP1 | forkhead box P1 | 27086 | 678 | MMQESGTETKSNGSAIQNGSGGSNHLLECGGLREGRSNGETPAVDI | 286. |
| | [Source:HGNC | | | GAADLAHAQQQQQQALQVARQLLLQQQQQQQVSGLKSPKRNDK | |
| | Symbol; Acc:HGNC: | | | QPALQVPVSVAMMTPQVITPQQMQQILQQQVLSPQQLQVLLQQQQ | |
| | 3823] | | | ALMLQQQQLQEFYKKQQEQLQLQLLQQQHAGKQPKEQQQVATQQ | |
| | | | | LAFQQQLLQMQQLQQQHLLSLQRQGLLTIQPGQPALPLQPLAQGMI | |
| | | | | PTELQQLWKEVTSAHTAEETTGNNHSSLDLTTTCVSSSAPSKTSLIM | |
| | | | | NPHASTNGQLSVHTPKRESLSHEEHPHSHPLYGHGVCKWPGCEAV | |
| | | | | CEDFQSFLKHLNSEHALDDRSTAQCRVQMQVVQQLELQLAKDKER | |
| | | | | LQAMMTHLHVKSTEPKAAPQPLNLVSSVTLSKSASEASPQSLPHTP | |
| | | | | TTPTAPLTPVTQGPSVITTTSMHTVGPIRRRYSDKYNVPISSADIAQN | |
| | | | | QEFYKNAEVRPPFTYASLIRQAILESPEKQLTLNEIYNWFTRMFAYF | |
| | | | | RRNAATWKNAVRHNLSLHKCFVRVENVKGAVWTVDEVEFQKRRP | |
| | | | | QKISGNPSLIKNMQSSHAYCTPLNAALQASMAENSIPLYTTASMGN | |
| | | | | PTLGNLASAIREELNGAMEHTNSNESDSSPGRSPMQAVHPVHVKEE | |
| | | | | PLDPEEAEGPLSLVTTANHSPDFDHDRDYEDEPVNEDME* | |
| FOXP1 | forkhead box P1 | 27086 | 231 | MMTPQVITPQQMQQILQQQVLSPQQLQVLLQQQQALMLQQQQLQ | 287. |
| | [Source:HGNC | | | EFYKKQQEQLQLQLLQQQHAGKQPKEQVATQQLAFQQQLLQMQQ | |
| | Symbol; Acc:HGNC: | | | LQQQHLLSLQRQGLLTIQPGQPALPLQPLAQGMIPTELQQLWKEVT | |
| | 3823] | | | SAHTAEETTGNNHSSLDLTTTCVSSSAPSKTSLIMNPHASTNGQLSV | |
| | | | | HTPKRESLSHEEHPHSHPLYGHGVCKWPGCEAVCEDFQSFLKHLNS | |
| | | | | EHAL | |
| FOXP1 | forkhead box P1 | 27086 | 602 | MMQESGTETKSNGSAIQNGSGGSNHLLECGGLREGRSNGETPAVDI | 288. |
| | [Source:HGNC | | | GAADLAHAQQQQQQALQVARQLLLQQQQQQQVSGLKSPKRNDK | |
| | Symbol; Acc:HGNC: | | | QPALQQQQVATQQLAFQQQLLQMQQLQQQHLLSLQRQGLLTIQPG | |
| | 3823] | | | QPALPLQPLAQGMIPTELQQLWKEVTSAHTAEETTGNNHSSLDLTT | |
| | | | | TCVSSSAPSKTSLIMNPHASTNGQLSVHTPKRESLSHEEHPHSHPLY | |
| | | | | GHGVCKWPGCEAVCEDFQSFLKHLNSEHALDDRSTAQCRVQMQV | |
| | | | | VQQLELQLAKDKERLQAMMTHLHVKSTEPKAAPQPLNLVSSVTLS | |
| | | | | KSASEASPQSLPHTPTTPTAPLTPVTQGPSVITTTSMHTVGPIRRRYS | |
| | | | | DKYNVPISSADIAQNQEFYKNAEVRPPFTYASLIRQAILESPEKQLTL | |
| | | | | NEIYNWFTRMFAYFRRNAATWKNAVRHNLSLHKCFVRVENVKGA | |
| | | | | VWTVDEVEFQKRRPQKISGNPSLIKNMQSSHAYCTPLNAALQASM | |
| | | | | AENSIPLYTTASMGNPTLGNLASAIREELNGAMEHTNSNESDSSPGR | |
| | | | | SPMQAVHPVHVKEEPLDPEEAEGPLSLVTTANHSPDFDHDRDYEDE | |
| | | | | PVNEDME* | |
| FOXP1 | forkhead box P1 | 27086 | 677 | MMQESGTETKSNGSAIQNGSGGSNHLLECGGLREGRSNGETPAVDI | 289. |
| | [Source:HGNC | | | GAADLAHAQQQQQQALQVARQLLLQQQQQQQVSGLKSPKRNDK | |
| | Symbol; Acc:HGNC: | | | QPALQVPVSVAMMTPQVITPQQMQQILQQQVLSPQQLQVLLQQQQ | |
| | 3823] | | | ALMLQQQQLQEFYKKQQEQLQLQLLQQQHAGKQPKEQQQVATQQ | |
| | | | | LAFQQQLLQMQQLQQQHLLSLQRQGLLTIQPGQPALPLQPLAQGMI | |
| | | | | PTELQQLWKEVTSAHTAEETTGNNHSSLDLTTTCVSSSAPSKTSLIM | |
| | | | | NPHASTNGQLSVHTPKRESLSHEEHPHSHPLYGHGVCKWPGCEAV | |
| | | | | CEDFQSFLKHLNSEHALDDRSTAQCRVQMQVVQQLELQLAKDKER | |
| | | | | LQAMMTHLHVKSTEPKAAPQPLNLVSSVTLSKSASEASPQSLPHTP | |
| | | | | TTPTAPLTPVTQGPSVITTTSMHTVGPIRRRYSDKYNVPISSDIAQNQ | |
| | | | | EFYKNAEVRPPFTYASLIRQAILESPEKQLTLNEIYNWFTRMFAYFR | |
| | | | | RNAATWKNAVRHNLSLHKCFVRVENVKGAVWTVDEVEFQKRRP | |
| | | | | QKISGNPSLIKNMQSSHAYCTPLNAALQASMAENSIPLYTTASMGN | |
| | | | | PTLGNLASAIREELNGAMEHTNSNESDSSPGRSPMQAVHPVHVKEE | |
| | | | | PLDPEEAEGPLSLVTTANHSPDFDHDRDYEDEPVNEDME* | |
| FOXP1 | forkhead box P1 | 27086 | 577 | MMTPQVITPQQMQQILQQQVLSPQQLQVLLQQQQALMLQQQLQEF | 290. |
| | [Source:HGNC | | | YKKQQEQLQLQLLQQQHAGKQPKEQQQVATQQLAFQQQLLQMQ | |
| | Symbol; Acc:HGNC: | | | QLQQQHLLSLQRQGLLTIQPGQPALPLQPLAQGMIPTELQQLWKEV | |
| | 3823] | | | TSAHTAEETTGNNHSSLDLTTTCVSSSAPSKTSLIMNPHASTNGQLS | |
| | | | | VHTPKRESLSHEEHPHSHPLYGHGVCKWPGCEAVCEDFQSFLKHL | |
| | | | | NSEHALDDRSTAQCRVQMQVVQQLELQLAKDKERLQAMMTHLH | |
| | | | | VKSTEPKAAPQPLNLVSSVTLSKSASEASPQSLPHTPTTPTAPLTPVT | |
| | | | | QGPSVITTTSMHTVGPIRRRYSDKYNVPISSADIAQNQEFYKNAEVR | |
| | | | | PPFTYASLIRQAILESPEKQLTLNEIYNWFTRMFAYFRRNAATWKN | |
| | | | | AVRHNLSLHKCFVRVENVKGAVWTVDEVEFQKRRPQKISGNPSLI | |
| | | | | KNMQSSHAYCTPLNAALQASMAENSIPLYTTASMGNPTLGNLASAI | |
| | | | | REELNGAMEHTNSNESDSSPGRSPMQAVHPVHVKEEPLDPEEAEGP | |
| | | | | LSLVTTANHSPDFDHDRDYEDEPVNEDME* | |
| FOXP1 | forkhead box P1 | 27086 | 123 | MMTPQVITPQQMQQILQQQVLSPQQLQVLLQQQQALMLQQQQLQ | 291. |
| | [Source:HGNC | | | EFYKKQQEQLQLQLLQQQHAGKQPKEQQQVATQQLAFQQQLLQM | |
| | Symbol; Acc:HGNC: | | | QQLQQQHLLSLQRQGLLTIQPGQPALPLQPLAQGM | |
| | 3823] | | | | |
| FOXP1 | forkhead box P1 | 27086 | 36 | MMQESGTETKSNGSAIQNGSGGSNHLLECGGLREGR | 292. |
| | [Source:HGNC | | | | |
| | Symbol; Acc:HGNC: | | | | |
| | 3823] | | | | |
| FOXP1 | forkhead box P1 | 27086 | 208 | XALQVPVSVAMMTPQVITPQQMQQILQQQVLSPQQLQVLLQQQQA | 293. |
| | [Source:HGNC | | | LMLQQQQLQEFYKKQQEQLQLQLLQQQHAGKQPKEQQQVATQQL | |
| | Symbol; Acc:HGNC: | | | AFQQQLLQMQQLQQQHLLSLQRQGLLTIQPGQPALPLQPLAQGMIP | |
| | 3823] | | | TELQQLWKEVTSAHTAEETTGNNHSSLDLTTTCVSSSAPSKTSLIMN | |
| | | | | PHASTNGQLSVHTPKRERQSFHTQR* | |
| FOXP1 | forkhead box P1 | 27086 | 491 | MQQLQQQHLLSLQRQGLLTIQPGQPALPLQPLAQGMIPTELQQLWK | 294. |
| | [Source:HGNC | | | EVTSAHTAEETTGNNHSSLDLTTTCVSSSAPSKTSLIMNPHASTNGQ | |
| | Symbol; Acc:HGNC: | | | LSVHTPKRESLSHEEHPHSHPLYGHGVCKWPGCEAVCEDFQSFLKH | |
| | 3823] | | | LNSEHALDDRSTAQCRVQMQVVQQLELQLAKDKERLQAMMTHLH | |
| | | | | VKSTEPKAAPQPLNLVSSVTLSKSASEASPQSLPHTPTTPTAPLTPVT | |
| | | | | QGPSVITTTSMHTVGPIRRRYSDKYNVPISSADIAQNQEFYKNAEVR | |
| | | | | PPFTYASLIRQAILESPEKQLTLNEIYNWFTRMFAYFRRNAATWKN | |
| | | | | AVRHNLSLHKCFVRVENVKGAVWTVDEVEFQKRRPQKISGNPSLI | |
| | | | | KNMQSSHAYCTPLNAALQASMAENSIPLYTTASMGNPTLGNLASAI | |
| | | | | REELNGAMEHTNSNESDSSPGRSPMQAVHPVHVKEEPLDPEEAEGP | |
| | | | | LSLVTTANHSPDFDHDRDYEDEPVNEDME* | |
| FOXP1 | forkhead box P1 | 27086 | 613 | MMQESGTETKSNGSAIQNGSGGSNHLLECGGLREGRSNGETPAVDI | 295. |
| | [Source:HGNC | | | GAADLAHAQQQQQQALQVARQLLLQQQQQQQVSGLKSPKRNDK | |
| | Symbol; Acc:HGNC: | | | QPALQVPVSVAMMTPQVITPQQMQQILQQQVLSPQQLQVLLQQQQ | |
| | 3823] | | | ALMLQQQLQEFYKKQQEQLQLQLLQQQHAGKQPKEQQQVATQQL | |
| | | | | AFQQQLLQMQQLQQQHLLSLQRQGLLTIQPGQPALPLQPLAQGMIP | |
| | | | | TELQQLWKEVTSAHTAEETTGNNHSSLDLTTTCVSSSAPSKTSLIMN | |
| | | | | PHASTNGQLSVHTPKRESLSHEEHPHSHPLYGHGVCKWPGCEAVC | |
| | | | | EDFQSFLKHLNSEHALDDRSTAQCRVQMQVVQQLELQLAKDKERL | |
| | | | | QAMMTHLHVKSTEPKAAPQPLNLVSSVTLSKSASEASPQSLPHTPT | |
| | | | | TPTAPLTPVTQGPSVITTTSMHTVGPIRRRYSDKYNVPISSADIAQNQ | |
| | | | | EFYKNAEVRPPFTYASLIRQAILESPEKQLTLNEIYNWFTRMFAYFR | |
| | | | | RNAATWKASMAENSIPLYTTASMGNPTLGNLASAIREELNGAMEH | |
| | | | | TNSNESDSSPGRSPMQAVHPVHVKEEPLDPEEAEGPLSLVTTANHSP | |
| | | | | DFDHDRDYEDEPVNEDME* | |
| FOXP1 | forkhead box P1 | 27086 | 411 | MMTPQVITPQQMQQILQQQVLSPQQLQVLLQQQQALMLQQQQLQ | 296. |
| | [Source:HGNC | | | EFYKKQQEQLQLQLLQQQHAGKQPKEQQQVATQQLAFQQQLLQM | |
| | Symbol; Acc:HGNC: | | | QQLQQQHLLSLQRQGLLTIQPGQPALPLQPLAQGMIPTELQQLWKE | |
| | 2383] | | | VTSAHTAEETTGNNHSSLDLTTTCVSSSAPSKTSLIMNPHASTNGQL | |
| | | | | SVHTPKRESLSHEEHPHSHPLYGHGVCKWPGCEAVCEDFQSFLKHL | |
| | | | | NSEHALDDRSTAQCRVQMQVVQQLELQLAKDKERLQAMMTHLH | |
| | | | | VKSTEPKAAPQPLNLVSSVTLSKSASEASPQSLPHTPTTPTAPLTPVT | |
| | | | | QGPSVITTTSMHTVGPIRRRYSDKYNVPISSADIAQNQEFYKNAEVR | |
| | | | | PPFTYASLIRQAILESPEKQLTLNEIYNWFTRMFAYFRRNAATWK* | |
| FOXP1 | forkhead box P1 | 27086 | 335 | MMQESGTETKSNGSAIQNGSGGSNHLLECGGLREGRSNGETPAVDI | 297. |
| | [Source:HGNC | | | GAADLAHAQQQQQQALQVARQLLLQQQQQQQVSGLKSPKRNDK | |
| | Symbol; Acc:HGNC: | | | QPALQVPVSVAMMTPQVITPQQMQQILQQQVLSPQQLQVLLQQQQ | |
| | 3823] | | | ALMLQQQLQEFYKKQQEQLQLQLLQQQHAGKQPKEQQQVATQQL | |
| | | | | AFQQQLLQMQQLQQQHLLSLQRQGLLTIQPGQPALPLQPLAQGMIP | |
| | | | | TELQQLWKEVTSAHTAEETTGNNHSSLDLTTTCVSSSAPSKTSLIMN | |
| | | | | PHASTNGQLSVHTPKRESLSHEEHPHSHPLYGHGVCKWPGCEAVC | |
| | | | | EDFQSFLNLQKTKNACKP* | |
| FOXP1 | forkhead box P1 | 27086 | 578 | MMTPQVITPQQMQQILQQQVLSPQQLQVLLQQQQALMLQQQQLQ | 298. |
| | [Source:HGNC | | | EFYKKQQEQLQLQLLQQQHAGKQPKEQQQVATQQLAFQQQLLQM | |
| | Symbol; Acc:HGNC: | | | QQLQQQHLLSLQRQGLLTIQPGQPALPLQPLAQGMIPTELQQLWKE | |
| | 3823] | | | VTSAHTAEETTGNNHSSLDLTTTCVSSSAPSKTSLIMNPHASTNGQL | |
| | | | | SVHTPKRESLSHEEHPHSHPLYGHGVCKWPGCEAVCEDFQSFLKHL | |
| | | | | NSEHALDDRSTAQCRVQMQVVQQLELQLAKDKERLQAMMTHLH | |
| | | | | VKSTEPKAAPQPLNLVSSVTLSKSASEASPQSLPHTPTTPTAPLTPVT | |
| | | | | QGPSVITTTSMHTVGPIRRRYSDKYNVPISSADIAQNQEFYKNAEVR | |
| | | | | PPFTYASLIRQAILESPEKQLTLNEIYNWFTRMFAYFRRNAATWKN | |
| | | | | AVRHNLSLHKCFVRVENVKGAVWTVDEVEFQKRRPQKISGNPSLI | |
| | | | | KNMQSSHAYCTPLNAALQASMAENSIPLYTTASMGNPTLGNLASAI | |
| | | | | REELNGAMEHTNSNESDSSPGRSPMQAVHPVHVKEEPLDPEEAEGP | |
| | | | | LSLVTTANHSPDFDHDRDYEDEPVNEDME* | |
| FOXP1 | forkhead box P1 | 27086 | 17 | MMQESGTETKSNGSAIQ | 299. |
| | [Source:HGNC | | | | |
| | Symbol; Acc:HGNC: | | | | |
| | 3823] | | | | |
| FOXP1 | forkhead box P1 | 27086 | 677 | MMQESGTETKSNGSAIQNGSGGSNHLLECGGLREGRSNGETPAVDI | 300. |
| | [Source:HGNC | | | GAADLAHAQQQQQQALQVARQLLLQQQQQQQVSGLKSPKRNDK | |
| | Symbol; Acc:HGNC: | | | QPALQVPVSVAMMTPQVITPQQMQQILQQQVLSPQQLQVLLQQQQ | |
| | 3823] | | | ALMLQQQLQEFYKKQQEQLQLQLLQQQHAGKQPKEQQQVATQQL | |
| | | | | AFQQQLLQMQQLQQQHLLSLQRQGLLTIQPGQPALPLQPLAQGMIP | |
| | | | | TELQQLWKEVTSAHTAEETTGNNHSSLDLTTTCVSSSAPSKTSLIMN | |
| | | | | PHASTNGQLSVHTPKRESLSHEEHPHSHPLYGHGVCKWPGCEAVC | |
| | | | | EDFQSFLKHLNSEHALDDRSTAQCRVQMQVVQQLELQLAKDKERL | |
| | | | | QAMMTHLHVKSTEPKAAPQPLNLVSSVTLSKSASEASPQSLPHTPT | |
| | | | | TPTAPLTPVTQGPSVITTTSMHTVGPIRRRYSDKYNVPISSADIAQNQ | |
| | | | | EFYKNAEVRPPFTYASLIRQAILESPEKQLTLNEIYNWFTRMFAYFR | |
| | | | | RNAATWKNAVRHNLSLHKCFVRVENVKGAVWTVDEVEFQKRRP | |
| | | | | QKISGNPSLIKNMQSSHAYCTPLNAALQASMAENSIPLYTTASMGN | |
| | | | | PTLGNLASAIREELNGAMEHTNSNESDSSPGRSPMQAVHPVHVKEE | |
| | | | | PLDPEEAEGPLSLVTTANHSPDFDHDRDYEDEPVNEDME* | |
| FOXP1 | forkhead box P1 | 27086 | 673 | MMQESGTETKSNGSAIQNGSGGSNHLLECGGLREGRSNGETPAVDI | 301. |
| | [Source:HGNC | | | GAADLAHAQQQQQQVARQLLLQQQQQQQVSGLKSPKRNDKQPAL | |
| | Symbol; Acc:HGNC: | | | QVPVSVAMMTPQVITPQQMQQILQQQVLSPQQLQVLLQQQQALML | |
| | 3823] | | | QQQLQEFYKKQQEQLQLQLLQQQHAGKQPKEQQQVATQQLAFQQ | |
| | | | | QLLQMQQLQQQHLLSLQRQGLLTIQPGQPALPLQPLAQGMIPTELQ | |
| | | | | QLWKEVTSAHTAEETTGNNHSSLDLTTTCVSSSAPSKTSLIMNPHAS | |
| | | | | TNGQLSVHTPKRESLSHEEHPHSHPLYGHGVCKWPGCEAVCEDFQ | |
| | | | | SFLKHLNSEHALDDRSTAQCRVQMQVVQQLELQLAKDKERLQAM | |
| | | | | MTHLHVKSTEPKAAPQPLNLVSSVTLSKSASEASPQSLPHTPTTPTA | |
| | | | | PLTPVTQGPSVITTTSMHTVGPIRRRYSDKYNVPISSDIAQNQEFYKN | |
| | | | | AEVRPPFTYASLIRQAILESPEKQLTLNEIYNWFTRMFAYFRRNAAT | |
| | | | | WKNAVRHNLSLHKCFVRVENVKGAVWTVDEVEFQKRRPQKISGN | |
| | | | | PSLIKNMQSSHAYCTPLNAALQASMAENSIPLYTTASMGNPTLGNL | |
| | | | | ASAIREELNGAMEHTNSNESDSSPGRSPMQAVHPVHVKEEPLDPEE | |
| | | | | AEGPLSLVTTANHSPDFDHDRDYEDEPVNEDME* | |
| FOXP1 | forkhead box P1 | 27086 | 148 | MMQESGTETKSNGSAIQNGSGGSNHLLECGGLREGRSNGETPAVDI | 302. |
| | [Source:HGNC | | | GAADLAHAQQQQQQALQVARQLLLQQQQQQQVSGLKSPKRNDK | |
| | Symbol; Acc:HGNC: | | | QPALQVPVSVAMMTPQVITPQQMQQILQQQVLSPQQLQVLLQQQQ | |
| | 2383] | | | ALMLQQQQLQEFYK | |
| FOXP1 | forkhead box P1 | 27086 | 210 | MMTPQVITPQQMQQILQQQVLSPQQLQVLLQQQQALMLQQQLQEF | 303. |
| | [Source:HGNC | | | YKKQQEQLQLQLLQQQHAGKQPKEQQQVATQQLAFQQQLLQMQ | |
| | Symbol; Acc:HGNC: | | | QLQQQHLLSLQRQGLLTIQPGQPALPLQPLAQGMIPTELQQLWKEV | |
| | 3823] | | | TSAHTAEETTGNNHSSLDLTTTCVSSSAPSKTSLIMNPHASTNGQLS | |
| | | | | VHTPKRESLSHEEHPHSHPLYGHGVCKWP | |
| FOXP1 | forkhead box P1 | 27086 | 576 | MMTPQVITPQQMQQILQQQVLSPQQLQVLLQQQQALMLQQQLQEF | 304. |
| | [Source:HGNC | | | YKKQQEQLQLQLLQQQHAGKQPKEQQQVATQQLAFQQQLLQMQ | |
| | Symbol; Acc:HGNC: | | | QLQQQHLLSLQRQGLLTIQPGQPALPLQPLAQGMIPTELQQLWKEV | |
| | 3823] | | | TSAHTAEETTGNNHSSLDLTTTCVSSSAPSKTSLIMNPHASTNGQLS | |
| | | | | VHTPKRESLSHEEHPHSHPLYGHGVCKWPGCEAVCEDFQSFLKHL | |
| | | | | NSEHALDDRSTAQCRVQMQVVQQLELQLAKDKERLQAMMTHLH | |
| | | | | VKSTEPKAAPQPLNLVSSVTLSKSASEASPQSLPHTPTTPTAPLTPVT | |
| | | | | QGPSVITTTSMHTVGPIRRRYSDKYNVPISSADIAQNQEFYKNAEVR | |
| | | | | PPFTYASLIRQAILESPEKQLTLNEIYNWFTRMFAYFRRNAATWKN | |
| | | | | AVRHNLSLHKCFVRVENVKGAVWTVDEVEFQKRRPQKISGNPSLI | |
| | | | | KNMQSSHAYCTPLNAALQASMAENSIPLYTTASMGNPTLGNLASAI | |
| | | | | REELNGAMEHTNSNESDSSPGRSPMQAVHPVHVKEEPLDPEEAEGP | |
| | | | | LSLVTTANHSPDFDHDRDYEDEPVNEDME | |
| FOXP1 | forkhead box P1 | 27086 | 74 | MMTPQVITPQQMQQILQQQVLSPQQLQVLLQQQQALMLQQQQLQ | 305. |
| | [Source:HGNC | | | EFYKKQQEQLQLQLLQQQHAGKQPKEFVP* | |
| | Symbol; Acc:HGNC: | | | | |
| | 3823] | | | | |
| FOXP1 | forkhead box P1 | 27086 | 694 | MMQESGTETKSNGSAIQNGSGGSNHLLECGGLREGRSNGETPAVDI | 306. |
| | [Source:HGNC | | | GAADLAHAQQQQQQALQVARQLLLQQQQQQQVSGLKSPKRNDK | |
| | Symbol; Acc:HGNC: | | | QPALQVPVSVAMMTPQVITPQQMQQILQQQVLSPQQLQVLLQQQQ | |
| | 3823] | | | ALMLQQQQLQEFYKKQQEQLQLQLLQQQHAGKQPKEQQQVATQQ | |
| | | | | LAFQQQLLQMQQLQQQHLLSLQRQGLLTIQPGQPALPLQPLAQGMI | |
| | | | | PTELQQLWKEVTSAHTAEETTGNNHSSLDLTTTCVSSSAPSKTSLIM | |
| | | | | NPHASTNGQLSVHTPKRESLSHEEHPHSHPLYGHGVCKWPGCEAV | |
| | | | | CEDFQSFLKHLNSEHALDDRSTAQCRVQMQVVQQLELQLAKDKER | |
| | | | | LQAMMTHLHVKSTEPKAAPQPLNLVSSVTLSKSASEASPQSLPHTP | |
| | | | | TTPTAPLTPVTQGPSVITTTSMHTVGPIRRRYSDKYNVPISSADIAQN | |
| | | | | QEFYKNAEVRPPFTYASLIRQAILESPEKQLTLNEIYNWFTRMFAYF | |
| | | | | RRNAATWKGAIRTNLSLHKCFIRVEDEFGSFWTVDDEEFKRGRHIQ | |
| | | | | RGRPRKYCPDENFDELVAHNPSLIKNMQSSHAYCTPLNAALQASM | |
| | | | | AENSIPLYTTASMGNPTLGNLASAIREELNGAMEHTNSNESDSSPGR | |
| | | | | SPMQAVHPVHVKEEPLDPEEAEGPLSLVTTANHSPDFDHDRDYEDE | |
| | | | | PVNEDME* | |
| FOXP1 | forkhead box P1 | 27086 | 75 | MMQESGTETKSNGSAIQNGSGGSNHLLECGGLREGRSNGETPAVDI | 307. |
| | [Source:HGNC | | | GAADLAHAQQQQQQALQVARQLLLQQQQQ | |
| | Symbol; Acc:HGNC: | | | | |
| | 3823] | | | | |
| FOXP1 | forkhead box P1 | 27086 | 676 | MMQESGTETKSNGSAIQNGSGGSNHLLECGGLREGRSNGETPAVDI | 308. |
| | [Source:HGNC | | | GAADLAHAQQQQQQALQVARQLLLQQQQQQQVSGLKSPKRNDK | |
| | Symbol; Acc:HGNC: | | | QPALQVPVSVAMMTPQVITPQQMQQILQQQVLSPQQLQVLLQQQQ | |
| | 3823] | | | ALMLQQQLQEFYKKQQEQLQLQLLQQQHAGKQPKEQQQVATQQL | |
| | | | | AFQQQLLQMQQLQQQHLLSLQRQGLLTIQPGQPALPLQPLAQGMIP | |
| | | | | TELQQLWKEVTSAHTAEETTGNNHSSLDLTTTCVSSSAPSKTSLIMN | |
| | | | | PHASTNGQLSVHTPKRESLSHEEHPHSHPLYGHGVCKWPGCEAVC | |
| | | | | EDFQSFLKHLNSEHALDDRSTAQCRVQMQVVQQLELQLAKDKERL | |
| | | | | QAMMTHLHVKSTEPKAAPQPLNLVSSVTLSKSASEASPQSLPHTPT | |
| | | | | TPTAPLTPVTQGPSVITTTSMHTVGPIRRRYSDKYNVPISSDIAQNQE | |
| | | | | FYKNAEVRPPFTYASLIRQAILESPEKQLTLNEIYNWFTRMFAYFRR | |
| | | | | NAATWKNAVRHNLSLHKCFVRVENVKGAVWTVDEVEFQKRRPQ | |
| | | | | KISGNPSLIKNMQSSHAYCTPLNAALQASMAENSIPLYTTASMGNPT | |
| | | | | LGNLASAIREELNGAMEHTNSNESDSSPGRSPMQAVHPVHVKEEPL | |
| | | | | DPEEAEGPLSLVTTANHSPDFDHDRDYEDEPVNEDME* | |
| FOXP1 | forkhead box P1 | 27086 | 210 | MQQLQQQHLLSLQRQGLLTIQPGQPALPLQPLAQGMIPTELQQLWK | 309. |
| | [Source:HGNC | | | EVTSAHTAEETTGNNHSSLDLTTTCVSSSAPSKTSLIMNPHASTNGQ | |
| | Symbol; Acc:HGNC: | | | LSVHTPKRESLSHEEHPHSHPLYGHGVCKWPGCEAVCEDFQSFLKH | |
| | 3823] | | | LNSEHALDDRSTAQCRVQMQVVQQLELQLAKDKERLQAMMTHLH | |
| | | | | VKSTEPKAAPQPLNLVSSVTLSKSASE | |
| FOXP1 | forkhead box P1 | 27086 | 628 | MMQESGTETKSNGSAIQNGSGGSNHLLECGGLREGRSNGETPAVDI | 310. |
| | [Source:HGNC | | | GAADLAHAQQQQQQALQVARQLLLQQQQQQQVSGLKSPKRNDK | |
| | Symbol; Acc:HGNC: | | | QPALQVPVSVAMMTPQVITPQQMQQILQQQVLSPQQLQVLLQQQQ | |
| | 3823] | | | ALMLQQQQLQEFYKKQQEQLQLQLLQQQHAGKQPKEQQQVATQQ | |
| | | | | LAFQQQLLQMQQLQQQHLLSLQRQGLLTIQPGQPALPLQPLAQGMI | |
| | | | | PTELQQLWKEVTSAHTAEETTGNNHSSLDLTTTCVSSSAPSKTSLIM | |
| | | | | NPHASTNGQLSVHTPKRESLSHEEHPHSHPLYGHGVCKWPGCEAV | |
| | | | | CEDFQSFLKHLNSEHALDDRSTAQCRVQMQVVQQLELQLAKDKER | |
| | | | | LQAMMTHLHVKSTEPKAAPQPLNLVSSVTLSKSASEASPQSLPHTP | |
| | | | | TTPTAPLTPVTQGPSVITTTSMHTVGPIRRRYSDKYNVPISSADIAQN | |
| | | | | QEFYKNAEVRPPFTYASLIRQAILESPEKQLTLNEIYNWFTRMFAYF | |
| | | | | RRNAATWKNAVRHNLSLHKCFVRVENVKGAVWTVDEVEFQKRRP | |
| | | | | QKISGNPSLIKNMQSSHAYCTPLNAALQASMAENSIPLYTTASMGN | |
| | | | | PTLGNLASAIREELNGAMEHTNSNESDSSPGRSPMQ | |
| FOXP1 | forkhead box P1 | 27086 | 57 | MMQESGTETKSNGSAIQNGSGGSNHLLECGGLREGRSNGETPAVDI | 311. |
| | [Source:HGNC | | | GAADLAHAQQQ | |
| | Symbol; Acc:HGNC: | | | | |
| | 2383] | | | | |
| FOXP1 | forkhead box P1 | 27086 | 577 | MMTPQVITPQQMQQILQQQVLSPQQLQVLLQQQQALMLQQQQLQ | 312. |
| | [Source:HGNC | | | EFYKKQQEQLQLQLLQQQHAGKQPKEQQQVATQQLAFQQQLLQM | |
| | Symbol; Acc:HGNC: | | | QQLQQQHLLSLQRQGLLTIQPGQPALPLQPLAQGMIPTELQQLWKE | |
| | 3823] | | | VTSAHTAEETTGNNHSSLDLTTTCVSSSAPSKTSLIMNPHASTNGQL | |
| | | | | SVHTPKRESLSHEEHPHSHPLYGHGVCKWPGCEAVCEDFQSFLKHL | |
| | | | | NSEHALDDRSTAQCRVQMQVVQQLELQLAKDKERLQAMMTHLH | |
| | | | | VKSTEPKAAPQPLNLVSSVTLSKSASEASPQSLPHTPTTPTAPLTPVT | |
| | | | | QGPSVITTTSMHTVGPIRRRYSDKYNVPISSDIAQNQEFYKNAEVRP | |
| | | | | PFTYASLIRQAILESPEKQLTLNEIYNWFTRMFAYFRRNAATWKNA | |
| | | | | VRHNLSLHKCFVRVENVKGAVWTVDEVEFQKRRPQKISGNPSLIK | |
| | | | | NMQSSHAYCTPLNAALQASMAENSIPLYTTASMGNPTLGNLASAIR | |
| | | | | EELNGAMEHTNSNESDSSPGRSPMQAVHPVHVKEEPLDPEEAEGPL | |
| | | | | SLVTTANHSPDFDHDRDYEDEPVNEDME* | |
| FOXP1 | forkhead box P1 | 27086 | 89 | MMQESGTETKSNGSAIQNGSGGSNHLLECGGLREGRSNGETPAVDI | 313. |
| | [Source:HGNC | | | GAADLAHAQQQQQQALQVARQLLLQQQQQQQVSGLKSPKRNDK | |
| | Symbol; Acc:HGNC: | | | | |
| | 3823] | | | | |
| FOXP1 | forkhead box P1 | 27086 | 336 | MMQESGTETKSNGSAIQNGSGGSNHLLECGGLREGRSNGETPAVDI | 314. |
| | [Source:HGNC | | | GAADLAHAQQQQQQALQVARQLLLQQQQQQQVSGLKSPKRNDK | |
| | Symbol; Acc:HGNC: | | | QPALQVPVSVAMMTPQVITPQQMQQILQQQVLSPQQLQVLLQQQQ | |
| | 3823] | | | ALMLQQQQLQEFYKKQQEQLQLQLLQQQHAGKQPKEQQQVATQQ | |
| | | | | LAFQQQLLQMQQLQQQHLLSLQRQGLLTIQPGQPALPLQPLAQGMI | |
| | | | | PTELQQLWKEVTSAHTAEETTGNNHSSLDLTTTCVSSSAPSKTSLIM | |
| | | | | NPHASTNGQLSVHTPKRESLSHEEHPHSHPLYGHGVCKWPGCEAV | |
| | | | | CEDFQSFLNLQKTKNACKP* | |
| FOXP1 | forkhead box P1 | 27086 | 468 | MQQLQQQHLLSLQRQGLLTIQPGQPALPLQPLAQGMIPTELQQLWK | 315. |
| | [Source:HGNC | | | EVTSAHTAEETTGNNHSSLDLTTTCVSSSAPSKTSLIMNPHASTNGQ | |
| | Symbol; Acc:HGNC: | | | LSVHTPKRESLSHEEHPHSHPLYGHGVCKWPGCEAVCEDFQSFLKH | |
| | 3823] | | | LNSEHALDDRSTAQCRVQMQVVQQLELQLAKDKERLQAMMTHLH | |
| | | | | VKSTEPKAAPQPLNLVSSVTLSKSASEASPQSLPHTPTTPTAPLTPVT | |
| | | | | QGPSVITTTSMHTVGPIRRRYSDKYNVPISSADIAQNQEFYKNAEVR | |
| | | | | PPFTYASLIRQAILESPEKQLTLNEIYNWFTRMFAYFRRNAATWKN | |
| | | | | AVRHNLSLHKCFVRVENVKGAVWTVDEVEFQKRRPQKISGNPSLI | |
| | | | | KNMQSSHAYCTPLNAALQASMAENSIPLYTTASMGNPTLGNLASAI | |
| | | | | REELNGAMEHTNSNESDSSPGRSPMQAVHPVHVKEEPLDPEEAEGP | |
| | | | | LSLVTTA | |
| FOXP1 | forkhead box P1 | 27086 | 680 | MFQCVFSSSVLQPHSTSCLFKHLFYHSATPASQKQPEPIYSKKTEIQR | 316. |
| | [Source:HGNC | | | QTVRAPFAKLFIFSALQVARQLLLQQQQQQQVSGLKSPKRNDKQPA | |
| | Symbol; Acc:HGNC: | | | LQVPVSVAMMTPQVITPQQMQQILQQQVLSPQQLQVLLQQQQALM | |
| | 3823] | | | LQQQQLQEFYKKQQEQLQLQLLQQQHAGKQPKEQQQVATQQLAF | |
| | | | | QQQLLQMQQLQQQHLLSLQRQGLLTIQPGQPALPLQPLAQGMIPTE | |
| | | | | LQQLWKEVTSAHTAEETTGNNHSSLDLTTTCVSSSAPSKTSLIMNP | |
| | | | | HASTNGQLSVHTPKRESLSHEEHPHSHPLYGHGVCKWPGCEAVCE | |
| | | | | DFQSFLKHLNSEHALDDRSTAQCRVQMQVVQQLELQLAKDKERLQ | |
| | | | | AMMTHLHVKSTEPKAAPQPLNLVSSVTLSKSASEASPQSLPHTPTTP | |
| | | | | TAPLTPVTQGPSVITTTSMHTVGPIRRRYSDKYNVPISSADIAQNQEF | |
| | | | | YKNAEVRPPFTYASLIRQAILESPEKQLTLNEIYNWFTRMFAYFRRN | |
| | | | | AATWKNAVRHNLSLHKCFVRVENVKGAVWTVDEVEFQKRRPQKI | |
| | | | | SGNPSLIKNMQSSHAYCTPLNAALQASMAENSIPLYTTASMGNPTL | |
| | | | | GNLASAIREELNGAMEHTNSNESDSSPGRSPMQAVHPVHVKEEPLD | |
| | | | | PEEAEGPLSLVTTANHSPDFDHDRDYEDEPVNEDME* | |
| SPIB | Spi-B transcription | 6689 | 178 | MLALEAAQLDGPHFSCLYPDGVFYDLDSCKHSSYPDSEGAPDSLW | 317. |
| | factor [Source:HGNC | | | DWTVAPPVPATPYEAFDPAAAAFSHPQAAQLCYEPPTYSPAGNLEL | |
| | Symbol; Acc:HGNC: | | | APSLEAPGPGLPAYPTENFASQTLVPPAYAPYPSPVLSEEEDLPLDSP | |
| | 11242] | | | ALEVSDSESDEALVAGPEGKGSEGLARSCACTSSCWGY* | |
| SPIB | Spi-B transcription | 6689 | 172 | MASSMTWTAASIPATLIQRGLLTLVPPAYAPYPSPVLSEEEDLPLDS | 318. |
| | factor [Source:HGNC | | | PALEVSDSESDEALVAGPEGKGSEAGTRKKLRLYQFLLGLLTRGDM | |
| | Symbol; Acc:HGNC: | | | RECVWWVEPGAGVFQFSSKHKELLARRWGQQKGNRKRMTYQKL | |
| | 11242] | | | ARALRNYAKTGEIRKVKRKLTYQFDSALLPAVRRA* | |
| SPIB | Spi-B transcription | 6689 | 127 | MLALEAAQFRWLEAASACPCVSPPPGSTGHTSAVCTQMASSMTWT | 319. |
| | factor [Source:HGNC | | | AASIPATLIQRGLLTPCGTGLWPHLSQPPPMKPSTRQQPLLATPRLPS | |
| | Symbol; Acc:HGNC: | | | SATNPPPTALQGTSNWPPAWRPRGLASLHTPRRT | |
| | 11242] | | | | |
| SPIB | Spi-B transcription | 6689 | 78 | MLALEAAQLDGPHFSCLYPDGVFYDLDSCKHSSYPDSEGAPDPGSP | 320. |
| | factor [Source:HGNC | | | GICPVPQPCAIRGGRLTVGQPCPGGLGQRVG* | |
| | Symbol; Acc:HGNC: | | | | |
| | 11242] | | | | |
| SPIB | Spi-B transcription | 6689 | 263 | MLALEAAQLDGPHFSCLYPDGVFYDLDSCKHSSYPDSEGAPDSLW | 321. |
| | factor [Source:HGNC | | | DWTVAPPVPATPYEAFDPAAAAFSHPQAAQLCYEPPTYSPAGNLEL | |
| | Symbol; Acc:HGNC: | | | APSLEAPGPGLPAYPTENFASQTLVPPAYAPYPSPVLSEEEDLPLDSP | |
| | 11242] | | | ALEVSDSESDEALVAGPEGKGSEAGTRKKLRLYQFLLGLLTRGDM | |
| | | | | RECVWWVEPGAGVFQFSSKHKELLARRWGQQKGNRKRMTYQKL | |
| | | | | ARALRNYAKTGEIRKVKRKLTYQFDSALLPAVRRA* | |
| SPIB | Spi-B transcription | 6689 | 138 | MLALEAAQLDGPHFSCLYPDGVFYDLDSCKHSSYPDSEGAPDSLW | 322. |
| | factor [Source:HGNC | | | DWTVAPPVPATPYEAFDPAAAAFSHPQAAQLCYEPPTYSPAGNLEL | |
| | Symbol; Acc:HGNC: | | | APSLEAPGPGLPAYPTENFASQPCAIRGGRLTVGQPCPGGLGQRVG* | |
| | 11242] | | | | |
| AFF3 | AF4/FMR2 family | 3899 | 1227 | MDSFDLALLQEWDLESLCVYEPDRNALRRKERERRNQETQQDDGT | 323. |
| | member 3 | | | FNSSYSLFSEPYKTNKGDELSNRIQNTLGNYDEMKDFLTDRSNQSH | |
| | [Source:HGNC | | | LVGVPKPGVPQTPVNKIDEHFVADSRAQNQPSSICSTTTSTPAAVPV | |
| | Symbol; Acc:HGNC: | | | QQSKRGTMGWQKAGHPPSDGQQRATQQGSLRTLLGDGVGRQQPR | |
| | 6473] | | | AKQVCNVEVGLQTQERPPAMAAKHSSSGHCVQNFPPSLASKPSLV | |
| | | | | QQKPTAYVRPMDGQDQAPDESPKLKSSSETSVHCTSYRGVPASKPE | |
| | | | | PARAKAKLSKFSIPKQGEESRSGETNSCVEEIIREMTWLPPLSAIQAP | |
| | | | | GKVEPTKFPFPNKDSQLVSSGHNNPKKGDAEPESPDNGTSNTSMLE | |
| | | | | DDLKLSSDEEENEQQAAQRTALRALSDSAVVQQPNCRTSVPSSKGS | |
| | | | | SSSSSSGSSSSSSDSESSSGSDSETESSSSESEGSKPPHFSSPEAEPASS | |
| | | | | NKWQLDKWLNKVNPHKPPILIQNESHGSESNQYYNPVKEDVQDCG | |
| | | | | KVPDVCQPSLREKEIKSTCKEEQRPRTANKAPGSKGVKQKSPPAAV | |
| | | | | AVAVSAAAPPPAVPCAPAENAPAPARRSAGKKPTRRTERTSAGDG | |
| | | | | ANCHRPEEPAAADALGTSVVVPPEPTKTRPCGNNRASHRKELRSSV | |
| | | | | TCEKRRTRGLSRIVPKSKEFIETESSSSSSSSDSDLESEQEEYPLSKAQ | |
| | | | | TVAASASSGNDQRLKEAAANGGSGPRAPVGSINARTTSDIAKELEE | |
| | | | | QFYTLVPFGRNELLSPLKDSDEIRSLWVKIDLTLLSRIPEHLPQEPGV | |
| | | | | LSAPATKDSESAPPSHTSDTPAEKALPKSKRKRKCDNEDDYREIKKS | |
| | | | | QGEKDSSSRLATSTSNTLSANHCNMNINSVAIPINKNEKMLRSPISPL | |
| | | | | SDASKHKYTSEDLTSSSRPNGNSLFTSASSSKKPKADSQLQPHGGDL | |
| | | | | TKAAHNNSENIPLHKSRPQTKPWSPGSNGHRDCKRQKLVFDDMPR | |
| | | | | SADYFMQEAKRMKHKADAMVEKFGKALNYAEAALSFIECGNAME | |
| | | | | QGPMESKSPYTMYSETVELIRYAMRLKTHSGPNATPEDKQLAALC | |
| | | | | YRCLALLYWRMFRLKRDHAVKYSKALIDYFKNSSKAAQAPSPWG | |
| | | | | ASGKSTGTPSPMSPNPSPASSVGSQGSLSNASALSPSTIVSIPQRIHQ | |
| | | | | MAANHVSITNSILHSYDYWEMADNLAKENREFFNDLDLLMGPVTL | |
| | | | | HSSMEHLVQYSQQGLHWLRNSAHLS* | |
| AFF3 | AF4/FMR2 family | 3899 | 1252 | MDSFDLALLQEWDLESLWGEDILNQRNDSLVVEFQSSASRCRSVYE | 324. |
| | member 3 | | | PDRNALRRKERERRNQETQQDDGTFNSSYSLFSEPYKTNKGDELSN | |
| | [Source:HGNC | | | RIQNTLGNYDEMKDFLTDRSNQSHLVGVPKPGVPQTPVNKIDEHFV | |
| | Symbol; Acc:HGNC: | | | ADSRAQNQPSSICSTTTSTPAAVPVQQSKRGTMGWQKAGHPPSDG | |
| | 6473] | | | QQRATQQGSLRTLLGDGVGRQQPRAKQVCNVEVGLQTQERPPAM | |
| | | | | AAKHSSSGHCVQNFPPSLASKPSLVQQKPTAYVRPMDGQDQAPDE | |
| | | | | SPKLKSSSETSVHCTSYRGVPASKPEPARAKAKLSKFSIPKQGEESRS | |
| | | | | GETNSCVEEIIREMTWLPPLSAIQAPGKVEPTKFPFPNKDSQLVSSGH | |
| | | | | NNPKKGDAEPESPDNGTSNTSMLEDDLKLSSDEEENEQQAAQRTA | |
| | | | | LRALSDSAVVQQPNCRTSVPSSKGSSSSSSSGSSSSSSDSESSSGSDSE | |
| | | | | TESSSSESEGSKPPHFSSPEAEPASSNKWQLDKWLNKVNPHKPPILIQ | |
| | | | | NESHGSESNQYYNPVKEDVQDCGKVPDVCQPSLREKEIKSTCKEEQ | |
| | | | | RPRTANKAPGSKGVKQKSPPAAVAVAVSAAAPPPAVPCAPAENAP | |
| | | | | APARRSAGKKPTRRTERTSAGDGANCHRPEEPAAADALGTSVVVP | |
| | | | | PEPTKTRPCGNNRASHRKELRSSVTCEKRRTRGLSRIVPKSKEFIETE | |
| | | | | SSSSSSSSDSDLESEQEEYPLSKAQTVAASASSGNDQRLKEAAANGG | |
| | | | | SGPRAPVGSINARTTSDIAKELEEQFYTLVPFGRNELLSPLKDSDEIR | |
| | | | | SLWVKIDLTLLSRIPEHLPQEPGVLSAPATKDSESAPPSHTSDTPAEK | |
| | | | | ALPKSKRKRKCDNEDDYREIKKSQGEKDSSSRLATSTSNTLSANHC | |
| | | | | NMNINSVAIPINKNEKMLRSPISPLSDASKHKYTSEDLTSSSRPNGNS | |
| | | | | LFTSASSSKKPKADSQLQPHGGDLTKAAHNNSENIPLHKSRPQTKP | |
| | | | | WSPGSNGHRDCKRQKLVFDDMPRSADYFMQEAKRMKHKADAMV | |
| | | | | EKFGKALNYAEAALSFIECGNAMEQGPMESKSPYTMYSETVELIRY | |
| | | | | AMRLKTHSGPNATPEDKQLAALCYRCLALLYWRMFRLKRDHAVK | |
| | | | | YSKALIDYFKNSSKAAQAPSPWGASGKSTGTPSPMSPNPSPASSVGS | |
| | | | | QGSLSNASALSPSTIVSIPQRIHQMAANHVSITNSILHSYDYWEMAD | |
| | | | | NLAKENREFFNDLDLLMGPVTLHSSMEHLVQYSQQGLHWLRNSA | |
| | | | | HLS* | |
| AFF3 | AF4/FMR2 family | 3899 | 17 | MDSFDLALLQEWDLESL | 325. |
| | member 3 | | | | |
| | [Source:HGNC | | | | |
| | Symbol; Acc:HGNC: | | | | |
| | 6473] | | | | |
| AFF3 | AF4/FMR2 family | 3899 | 165 | MDSFDLALLQEWDLESLWGEDILNQRNDSLVVEFQSSASRCRSVYE | 326. |
| | member 3 | | | PDRNALRRKERERRNQETQQDDGTFNSSYSLFSEPYKTNKGDELSN | |
| | [Source:HGNC | | | RIQNTLGNYDEMKDFLTDRSNQSHLVGVPKPGVPQTPVNKIDEHFV | |
| | Symbol; Acc:HGNC: | | | ADSRAQNQPSSICSTTTSTPAAVPVQQ | |
| | 6473] | | | | |
| AFF3 | AF4/FMR2 family | 3899 | 129 | MDSFDLALLQEWDLESLCVYEPDRNALRRKERERRNQETQQDDGT | 327. |
| | member 3 | | | FNSSYSLFSEPYKTNKGDELSNRIQNTLGNYDEMKDFLTDRSNQSH | |
| | [Source:HGNC | | | LVGVPKPGVPQTPVNKIDEHFVADSRAQNQPSSICSTT | |
| | Symbol; Acc:HGNC: | | | | |
| | 6473] | | | | |
| AFF3 | AF4/FMR2 family | 3899 | 99 | MDSFDLALLQEWDLESLCVYEPDRNALRRKERERRNQETQQDDGT | 328. |
| | member 3 | | | FNSSYSLFSEPYKTNKGDELSNRIQNTLGNYDEMKDFLTDRSNQSH | |
| | [Source:HGNC | | | LVGVPKPG | |
| | Symbol; Acc:HGNC: | | | | |
| | 6473] | | | | |
| AFF3 | AF4/FMR2 family | 3899 | 581 | GNNRASHRKELRSSVTCEKRRTRGLSRIVPKSKEFIETESSSSSSSSDS | 329. |
| | member 3 | | | DLESEQEEYPLSKAQTVAASASSGNDQRLKEAAANGGSGPRAPVG | |
| | [Source:HGNC | | | SINARTTSDIAKELEEQFYTLVPFGRNELLSPLKDSDEIRSLWVKIDL | |
| | Symbol; Acc:HGNC: | | | TLLSRIPEHLPQEPGVLSAPATKDSESAPPSHTSDTPAEKALPKSKRK | |
| | 6473] | | | RKCDNEDDYREIKKSQGEKDSSSRLATSTSNTLSANHCNMNINSVA | |
| | | | | IPINKNEKMLRSPISPLSDASKHKYTSEDLTSSSRPNGNSLFTSASSSK | |
| | | | | KPKADSQLQPHGGDLTKAAHNNSENIPLHKSRPQTKPWSPGSNGH | |
| | | | | RDCKRQKLVFDDMPRSADYFMQEAKRMKHKADAMVEKFGKALN | |
| | | | | YAEAALSFIECGNAMEQGPMESKSPYTMYSETVELIRYAMRLKTHS | |
| | | | | GPNATPEDKQLAALCYRCLALLYWRMFRLKRDHAVKYSKALIDYF | |
| | | | | KNSSKAAQAPSPWGASGNSVGSQGSLSNASALSPSTIVSIPQRIHQM | |
| | | | | AANHVSITNSILHSYDYWEMADNLAKENREFFNDLDLLMGPVTLH | |
| | | | | SSMEHLVQYSQQGLHWLRNSAHLS* | |
| AFF3 | AF4/FMR2 family | 3899 | 180 | XASKPSLVQQKPTAYVRPMDGQDQAPDESPKLKSSSETSVHCTSYR | 330. |
| | member 3 | | | GVPASKPEPARAKAKLSKFSIPKQGEESRSGETNSCVEEIIREMTWL | |
| | [Source:HGNC | | | PPLSAIQAPGKVEPTKFPFPNKDSQLVSSGHNNPKKGDAEPESPDNG | |
| | Symbol; Acc:HGNC: | | | TSNTSMLEDDLKLSSDEEENEQQAAQRTALRALSDSLSW* | |
| | 6473] | | | | |
| AFF3 | AF4/FMR2 family | 3899 | 161 | MDSFDLALLQEWDLESLCVYEPDRNALRRKERERRNQETQQDDGT | 331. |
| | member 3 | | | FNSSYSLFSEPYKTNKGDELSNRIQNTLGNYDEMKDFLTDRSNQSH | |
| | [Source:HGNC | | | LVGVPKPGVPQTPVNKIDEHFVADSRAQNQPSSICSTTTSTPAAVPV | |
| | Symbol; Acc:HGNC: | | | QQSKRGTMGWQKAGHPPSDGQQR | |
| | 6473] | | | | |
| AFF3 | AF4/FMR2 family | 3899 | 54 | MDSFDLALLQEWDLESLWGEDILNQRNDSLVVEFQSSASRCRSVYE | 332. |
| | member 3 | | | PDRNALRR | |
| | [Source:HGNC | | | | |
| | Symbol; Acc:HGNC: | | | | |
| | 6473] | | | | |
| AFF3 | AF4/FMR2 family | 3899 | 103 | MDSFDLALLQEWDLESLWGEDILNQRNDSLVVEFQSSASRCRSVYE | 333. |
| | member 3 | | | PDRNALRRKERERRNQETQQDDGTFNSSYSLFSEPYKTNKGDELSN | |
| | [Source:HGNC | | | RIQNTLGNYDE | |
| | Symbol; Acc:HGNC: | | | | |
| | 6473] | | | | |
| AFF3 | AF4/FMR2 family | 3899 | 114 | MDSFDLALLQEWDLESLCVYEPDRNALRRKERERRNQETQQDDGT | 334. |
| | member 3 | | | FNSSYSLFSEPYKTNKGDELSNRIQNTLGNYDEMKDFLTDRSNQSH | |
| | [Source:HGNC | | | LVGVPKPGVPQTPVNKIDEHFVA | |
| | Symbol; Acc:HGNC: | | | | |
| | 6473] | | | | |
| AFF3 | AF4/FMR2 family | 3899 | 380 | MDSFDLALLQEWDLESLWGEDILNQRNDSLVVEFQSSASRCRSVYE | 335. |
| | member 3 | | | PDRNALRRKERERRNQETQQDDGTFNSSYSLFSEPYKTNKGDELSN | |
| | [Source:HGNC | | | RIQNTLGNYDEMKDFLTDRSNQSHLVGVPKPGVPQTPVNKIDEHFV | |
| | Symbol; Acc:HGNC: | | | ADSRAQNQPSSICSTTTSTPAAVPVQQSKRGTMGWQKAGHPPSDG | |
| | 6473] | | | QQRATQQGSLRTLLGDGVGRQQPRAKQVCNVEVGLQTQERPPAM | |
| | | | | AAKHSSSGHCVQNFPPSLASKPSLVQQKPTAYVRPMDGQDQAPDE | |
| | | | | SPKLKSSSETSVHCTSYRGVPASKPEPARAKAKLSKFSIPKQGEESRS | |
| | | | | GETNSCVEEIIRYPRVCFSNAVQTEPALPGPGCTGHSLWRICSVGPP | |
| | | | | GAGRRQPTCLCA* | |
| AFF3 | AF4/FMR2 family | 3899 | 115 | MDSFDLALLQEWDLESLWGEDILNQRNDSLVVEFQSSASRCRSVYE | 336. |
| | member 3 | | | PDRNALRRKERERRNQETQQDDGTFNSSYSLFSEPYKTNKGDELSN | |
| | [Source:HGNC | | | RIQNTLGNYDEMKDFLTDRSNQS | |
| | Symbol; Acc:HGNC: | | | | |
| | 6473] | | | | |
| AFF3 | AF4/FMR2 family | 3899 | 608 | MDSFDLALLQEWDLESLCVYEPDRNALRRKERERRNQETQQDDGT | 337. |
| | member 3 | | | FNSSYSLFSEPYKTNKGDELSNRIQNTLGNYDEMKDFLTDRSNQSH | |
| | [Source:HGNC | | | LVGVPKPGVPQTPVNKIDEHFVADSRAQNQPSSICSTTTSTPAAVPV | |
| | Symbol; Acc:HGNC: | | | QQSKRGTMGWQKAGHPPSDGQQRATQQGSLRTLLGDGVGRQQPR | |
| | 6473] | | | AKQVCNVEVGLQTQERPPAMAAKHSSSGHCVQNFPPSLASKPSLV | |
| | | | | QQKPTAYVRPMDGQDQAPDESPKLKSSSETSVHCTSYRGVPASKPE | |
| | | | | PARAKAKLSKFSIPKQGEESRSGETNSCVEEIIREMTWLPPLSAIQAP | |
| | | | | GKVEPTKFPFPNKDSQLVSSGHNNPKKGDAEPESPDNGTSNTSMLE | |
| | | | | DDLKLSSDEEENEQQAAQRTALRALSDSAVVQQPNCRTSVPSSKGS | |
| | | | | SSSSSSGSSSSSSDSESSSGSDSETESSSSESEGSKPPHFSSPEAEPASS | |
| | | | | NKWQLDKWLNKVNPHKPPILIQNESHGSESNQYYNPVKEDVQDCG | |
| | | | | KVPDVCQPSLREKEIKSTCKEEQRPRTANKAPGSKGVKQKSPPAAV | |
| | | | | AVAVSAAAPPPAVPCAPAENAPAPARRSAGKKPTRRTERTSAGDG | |
| | | | | ANCHRPEEP | |
| AFF3 | AF4/FMR2 family | 3899 | 43 | MDSFDLALLQEWDLESLCVYEPDRNALRRKERERRNQETQQDD | 338. |
| | member 3 | | | | |
| | [Source:HGNC | | | | |
| | Symbol; Acc:HGNC: | | | | |
| | 6473] | | | | |
| AFF3 | AF4/FMR2 family | 3899 | 135 | XSAPPSHTSDTPAEKALPKSKRKRKCDNEDDYREIKKSQGEKDSSS | 339. |
| | member 3 | | | RLATSTSNTLSANHCNMNINSVAIPINKNEKMLRSPISPLSDASKHK | |
| | [Source:HGNC | | | YTSEDLTSSSRPNGNSLFTSASSSKKPKADSQLQPHGGDLT* | |
| | Symbol; Acc:HGNC: | | | | |
| | 6473] | | | | |
| AFF3 | AF4/FMR2 family | 3899 | 143 | MDSFDLALLQEWDLESLWGEDILNQRNDSLVVEFQSSASRCRSVYE | 340. |
| | member 3 | | | PDRNALRRKERERRNQETQQDDGTFNSSYSLFSEPYKTNKGDELSN | |
| | [Source:HGNC | | | RIQNTLGNYDEMKDFLTDRSNQSHLVGVPKPGVPQTPVNKIDEHFV | |
| | Symbol; Acc:HGNC: | | | ADSRA | |
| | 6473] | | | | |
| RCEI | Ras converting CAAX | 9986 | 330 | MAALGGDGLRLLSVSRPERPPESAALGGLGPGLCCWVSVFSCLSLA | 341. |
| | endopeptidase 1 | | | CSYVGSLYVWKSELPRDHPAVIKRRFTSVLVVSSLSPLCVLLWREL | |
| | [Source:HGNC | | | TGIQPGTSLLTLMGFRLEGIFPAALLPLLLTMILFLGPLMQLSMDCPC | |
| | Symbol; Acc:HGNC: | | | DLADGLKVVLAPRSWARCLTDMRWLRNQVIAPLTEELVFRACMLP | |
| | 13721] | | | MLAPCMGLGPAVFTCPLFFGVAHFHHIIEQLRFRQSSVGNIFLSAAF | |
| | | | | QFSYTAVFGAYTAFLFIRTGHLIGPVLCHSFCNYMGFPAVCAALEHP | |
| | | | | QRRPLLAGYALGVGLFLLLLQPLTDPKLYGSLPLCVLLERAGDSEA | |
| | | | | PLCS* | |
| RCE1 | Ras converting CAAX | 9986 | 103 | MAALGGDGLRLLSVSRPERPPESAALGGLGPGLCCWVSVFSCLSLA | 342. |
| | endopeptidase 1 | | | CSYVGSLYVWKSELPRDHPAVIKRRFTSVLVVSSLSPLCVLLWREL | |
| | [Source:HGNC | | | TGIQAHPCSP* | |
| | Symbol; Acc:HGNC: | | | | |
| | 13721] | | | | |
| RCE1 | Ras converting CAAX | 9986 | 309 | MAALGGDGLRLLSVSRPERPPESAALGGLGPGLCCWVSVFSCLSLA | 343. |
| | endopeptidase 1 | | | CSYVGSLYVWKSELPRDHPAVIKRRFTSVLVVSSLSPLCVLLWREL | |
| | [Source:HGNC | | | TGIQPGTSLLTLMGFRLEGIFPAALLPLLLTMILFLGPLMQLSMDCPC | |
| | Symbol; Acc:HGNC: | | | DLADGLKVVLAPRSWARCLTDMRWLRNQVIAPLTEELVFRACMLP | |
| | 13721] | | | MLAPCMGLGPAVFTCPLFFGVAHFHHIIEQLRFRQSSVGNIFLSAGH | |
| | | | | LIGPVLCHSFCNYMGFPAVCAALEHPQRRPLLAGYALGVGLFLLLL | |
| | | | | QPLTDPKLYGSLPLCVLLERAGDSEAPLCS* | |
| RCE1 | Ras converting CAAX | 9986 | 207 | MILFLGPLMQLSMDCPCDLADGLKVVLAPRSWARCLTDMRWLRN | 344. |
| | endopeptidase 1 | | | QVIAPLTEELVFRACMLPMLAPCMGLGPAVFTCPLFFGVAHFHHIIE | |
| | [Source:HGNC | | | QLRFRQSSVGNIFLSAAFQFSYTAVFGAYTAFLFIRTGHLIGPVLCHS | |
| | Symbol; Acc:HGNC: | | | FCNYMGFPAVCAALEHPQRRPLLAGYALGVGLFLLLLQPLTDPKLY | |
| | 13721] | | | GSLPLCVLLERAGDSEAPLCS* | |
| JAK1 | Janus kinase 1 | 3716 | 1155 | MQYLNIKEDCNAMAFCAKMRSSKKTEVNLEAPEPGVEVIFYLSDR | 345. |
| | [Source:HGNC | | | EPLRLGSGEYTAEELCIRAAQACRISPLCHNLFALYDENTKLWYAP | |
| | Symbol; Acc:HGNC: | | | NRTITVDDKMSLRLHYRMRFYFTNWHGTNDNEQSVWRHSPKKQK | |
| | 6190] | | | NGYEKKKIPDATPLLDASSLEYLFAQGQYDLVKCLAPIRDPKTEQD | |
| | | | | GHDIENECLGMAVLAISHYAMMKKMQLPELPKDISYKRYIPETLNK | |
| | | | | SIRQRNLLTRMRINNVFKDFLKEFNNKTICDSSVSTHDLKVKYLATL | |
| | | | | ETLTKHYGAEIFETSMLLISSENEMNWFHSNDGGNVLYYEVMVTG | |
| | | | | NLGIQWRHKPNVVSVEKEKNKLKRKKLENKHKKDEEKNKIREEW | |
| | | | | NNFSYFPEITHIVIKESVVSINKQDNKKMELKLSSHEEALSFVSLVDG | |
| | | | | YFRLTADAHHYLCTDVAPPLIVHNIQNGCHGPICTEYAINKLRQEGS | |
| | | | | EEGMYVLRWSCTDFDNILMTVTCFEKSEQVQGAQKQFKNFQIEVQ | |
| | | | | KGRYSLHGSDRSFPSLGDLMSHLKKQILRTDNISFMLKRCCQPKPRE | |
| | | | | ISNLLVATKKAQEWQPVYPMSQLSFDRILKKDLVQGEHLGRGTRT | |
| | | | | HIYSGTLMDYKDDEGTSEEKKIKVILKVLDPSHRDISLAFFEAASMM | |
| | | | | RQVSHKHIVYLYGVCVRDVENIMVEEFVEGGPLDLFMHRKSDVLT | |
| | | | | TPWKFKVAKQLASALSYLEDKDLVHGNVCTKNLLLAREGIDSECG | |
| | | | | PFIKLSDPGIPITVLSRQECIERIPWIAPECVEDSKNLSVAADKWSFGT | |
| | | | | TLWEICYNGEIPLKDKTLIEKERFYESRCRPVTPSCKELADLMTRCM | |
| | | | | NYDPNQRPFFRAIMRDINKLEEQNPDIVSEKKPATEVDPTHFEKRFL | |
| | | | | KRIRDLGEGHFGKVELCRYDPEGDNTGEQVAVKSLKPESGGNHIAD | |
| | | | | LKKEIEILRNLYHENIVKYKGICTEDGGNGIKLIMEFLPSGSLKEYLP | |
| | | | | KNKNKINLKQQLKYAVQICKGMDYLGSRQYVHRDLAARNVLVES | |
| | | | | EHQVKIGDFGLTKAIETDKEYYTVKDDRDSPVFWYAPECLMQSKF | |
| | | | | YIASDVWSFGVTLHELLTYCDSDSSPMALFLKMIGPTHGQMTVTRL | |
| | | | | VNTLKEGKRLPCPPNCPDEVYQLMRKCWEFQPSNRTSFQNLIEGFE | |
| | | | | ALLK* | |
| JAK1 | Janus kinase 1 | 3716 | 709 | MQYLNIKEDCNAMAFCAKMRSSKKTEVNLEAPEPGVEVIFYLSDR | 346. |
| | [Source HGNC | | | EPLRLGSGEYTAEELCIRAAQACRISPLCHNLFALYDENTKLWYAP | |
| | Symbol; Acc:HGNC: | | | NRTITVDDKMSLRLHYRMRFYFTNWHGTNDNEQSVWRHSPKKQK | |
| | 6190] | | | NGYEKKKIPDATPLLDASSLEYLFAQGQYDLVKCLAPIRDPKTEQD | |
| | | | | GHDIENECLGMAVLAISHYAMMKKMQLPELPKDISYKRYIPETLNK | |
| | | | | SIRQRNLLTRMRINNVFKDFLKEFNNKTICDSSVSTHDLKVKYLATL | |
| | | | | ETLTKHYGAEIFETSMLLISSENEMNWFHSNDGGNVLYYEVMVTG | |
| | | | | NLGIQWRHKPNVVSVEKEKNKLKRKKLENKHKKDEEKNKIREEW | |
| | | | | NNFSYFPEITHIVIKESVVSINKQDNKKMELKLSSHEEALSFVSLVDG | |
| | | | | YFRLTADAHHYLCTDVAPPLIVHNIQNGCHGPICTEYAINKLRQEGS | |
| | | | | EEGMYVLRWSCTDFDNILMTVTCFEKSEQVQGAQKQFKNFQIEVQ | |
| | | | | KGRYSLHGSDRSFPSLGDLMSHLKKQILRTDNISFMLKRCCQPKPRE | |
| | | | | ISNLLVATKKAQEWQPVYPMSQLSFDRILKKDLVQGEHLGRGTRT | |
| | | | | HIYSGTLMDYKDDEGTSEEKKIKVILKVLDPSHRDISLAFFEAASMM | |
| | | | | RQVSHKHIVYLYGVCVRDVESKCVLFQRGGWPGWGAWVLWRW | |
| | | | | WRLFPPSRCPGFLPFFLQLRRLRD* | |
| JAK1 | Janus kinase 1 | 3716 | 1153 | MQYLNIKEDCNAMAFCAKMRSSKKTEVNLEAPEPGVEVIFYLSDR | 347. |
| | [Source HGNC | | | EPLRLGSGEYTAEELCIRAAQACRISPLCHNLFALYDENTKLWYAP | |
| | Symbol; Acc:HGNC: | | | NRTITVDDKMSLRLHYRMRFYFTNWHGTNDNEQSVWRHSPKKQK | |
| | 6190] | | | NGYEKKKIPDATPLLDASSLEYLFAQGQYDLVKCLAPIRDPKTEQD | |
| | | | | GHDIENECLGMAVLAISHYAMMKKMQLPELPKDISYKRYIPETLNK | |
| | | | | SIRQRNLLTRMRINNVFKDFLKEFNNKTICDSSVSTHDLKVKYLATL | |
| | | | | ETLTKHYGAEIFETSMLLISSENEMNWFHSNDGGNVLYYEVMVTG | |
| | | | | NLGIQWRHKPNVVSVEKEKNKLKRKKLENKHKKDEEKNKIREEW | |
| | | | | NNFSYFPEITHIVIKESVVSINKQDNKKMELKLSSHEEALSFVSLVDG | |
| | | | | YFRLTADAHHYLCTDVAPPLIVHNIQNGCHGPICTEYAINKLRQEGS | |
| | | | | EEGMYVLRWSCTDFDNILMTVTCFEKSEQVQGAQKQFKNFQIEVQ | |
| | | | | KGRYSLHGSDRSFPSLGDLMSHLKKQILRTDNISFMLKRCCQPKPRE | |
| | | | | ISNLLVATKKAQEWQPVYPMSQLSFDRILKKDLVQGEHLGRGTRT | |
| | | | | HIYSGTLMDYKDDEGTSEEKKIKVILKVLDPSHRDISLAFFEAASMM | |
| | | | | RQVSHKHIVYLYGVCVRDVENIMVEEFVEGGPLDLFMHRKSDVLT | |
| | | | | TPWKFKVAKQLASALSYLEDKDLVHGNVCTKNLLLAREGIDSECG | |
| | | | | PFIKLSDPGIPITVLSRQECIERIPWIAPECVEDSKNLSVAADKWSFGT | |
| | | | | TLWEICYNGEIPLKDKTLIEKERFYESRCRPVTPSCKELADLMTRCM | |
| | | | | NYDPNQRPFFRAIMRDINKLEEQNIVSEKKPATEVDPTHFEKRFLKR | |
| | | | | IRDLGEGHFGKVELCRYDPEGDNTGEQVAVKSLKPESGGNHIADLK | |
| | | | | KEIEILRNLYHENIVKYKGICTEDGGNGIKLIMEFLPSGSLKEYLPKN | |
| | | | | KNKINLKQQLKYAVQICKGMDYLGSRQYVHRDLAARNVLVESEH | |
| | | | | QVKIGDFGLTKAIETDKEYYTVKDDRDSPVFWYAPECLMQSKFYIA | |
| | | | | SDVWSFGVTLHELLTYCDSDSSPMALFLKMIGPTHGQMTVTRLVN | |
| | | | | TLKEGKRLPCPPNCPDEVYQLMRKCWEFQPSNRTSFQNLIEGFEAL | |
| | | | | LK* | |
| JAK1 | Janus kinase 1 | 3716 | 88 | MQYLNIKEDCNAMAFCAKMRSSKKTEVNLEAPEPGVEVIFYLSDR | 348. |
| | [Source HGNC | | | EPLRLGSGEYTAEELCIRAAQACQWLLSAPSLMNYKIPGDDA* | |
| | Symbol; Acc:HGNC: | | | | |
| | 6190] | | | | |
| JAK1 | Janus kinase 1 | 3716 | 469 | XLYGVCVRDVENIMVEEFVEGGPLDLFMHRKSDVLTTPWKFKVAK | 349. |
| | [Source HGNC | | | QLASALSYLEDKDLVHGNVCTKNLLLAREGIDSECGPFIKLSDPGIPI | |
| | Symbol; Acc:HGNC: | | | TVLSRQECIERIPWIAPECVEDSKNLSVAADKWSFGTTLWEICYNGE | |
| | 6190] | | | IPLKDKTLIEKERFYESRCRPVTPSYPDIVSEKKPATEVDPTHFEKRF | |
| | | | | LKRIRDLGEGHFGKVELCRYDPEGDNTGEQVAVKSLKPESGGNHIA | |
| | | | | DLKKEIEILRNLYHENIVKYKGICTEDGGNGIKLIMEFLPSGSLKEYL | |
| | | | | PKNKNKINLKQQLKYAVQICKGMDYLGSRQYVHRDLAARNVLVE | |
| | | | | SEHQVKIGDFGLTKAIETDKEYYTVKDDRDSPVFWYAPECLMQSKF | |
| | | | | YIASDVWSFGVTLHELLTYCDSDSSPMALFLKMIGPTHGQMTVTRL | |
| | | | | VNTLKEGKRLPCPPNCPDEVYQLMRKCWEFQPSNRTSFQNLIEGFE | |
| | | | | ALLK* | |
| JAK1 | Janus kinase 1 | 3716 | 1111 | MQYLNIKEDCNAMAFCAKMRSSKKTEVNLEAPEPGVEVIFYLSDR | 350. |
| | [Source HGNC | | | EPLRLGSGEYTAEELCIRAAQACRISPLCHNLFALYDENTKLWYAP | |
| | Symbol; Acc:HGNC: | | | NRTITVDDKMSLRLHYRMRFYFTNWHGTNDNEQSVWRHSPKKQK | |
| | 6190] | | | NGYEKKKIPDATPLLDASSLEYLFAQGQYDLVKCLAPIRDPKTEQD | |
| | | | | GHDIENECLGMAVLAISHYAMMKKMQLPELPKDISVSTHDLKVKY | |
| | | | | LATLETLTKHYGAEIFETSMLLISSENEMNWFHSNDGGNVLYYEVM | |
| | | | | VTGNLGIQWRHKPNVVSVEKEKNKLKRKKLENKHKKDEEKNKIRE | |
| | | | | EWNNFSYFPEITHIVIKESVVSINKQDNKKMELKLSSHEEALSFVSL | |
| | | | | VDGYFRLTADAHHYLCTDVAPPLIVHNIQNGCHGPICTEYAINKLR | |
| | | | | QEGSEEGMYVLRWSCTDFDNILMTVTCFEKSEQVQGAQKQFKNFQ | |
| | | | | IEVQKGRYSLHGSDRSFPSLGDLMSHLKKQILRTDNISFMLKRCCQP | |
| | | | | KPREISNLLVATKKAQEWQPVYPMSQLSFDRILKKDLVQGEHLGRG | |
| | | | | TRTHIYSGTLMDYKDDEGTSEEKKIKVILKVLDPSHRDISLAFFEAA | |
| | | | | SMMRQVSHKHIVYLYGVCVRDVENIMVEEFVEGGPLDLFMHRKSD | |
| | | | | VLTTPWKFKVAKQLASALSYLEDKDLVHGNVCTKNLLLAREGIDS | |
| | | | | ECGPFIKLSDPGIPITVLSRQECIERIPWIAPECVEDSKNLSVAADKWS | |
| | | | | FGTTLWEICYNGEIPLKDKTLIEKERFYESRCRPVTPSCKELADLMT | |
| | | | | RCMNYDPNQRPFFRAIMRDINKLEEQNPDIVSEKKPATEVDPTHFE | |
| | | | | KRFLKRIRDLGEGHFGKVELCRYDPEGDNTGEQVAVKSLKPESGG | |
| | | | | NHIADLKKEIEILRNLYHENIVKYKGICTEDGGNGIKLIMEFLPSGSL | |
| | | | | KEYLPKNKNKINLKQQLKYAVQICKGMDYLGSRQYVHRDLAARN | |
| | | | | VLVESEHQVKIGDFGLTKAIETDKEYYTVKDDRDSPVFWYAPECL | |
| | | | | MQSKFYIASDVWSFGVTLHELLTYCDSDSSPMALFLKMIGPTHGQ | |
| | | | | MTVTRLVNTLKEGKRLPCPPNCPDEVYQLMRKCWEFQPSNRTSFQ | |
| | | | | NLIEGFEALLK* | |
| JAK1 | Janus kinase 1 | 3716 | 131 | MQYLNIKEDCNAMAFCAKMRSSKKTEVNLEAPEPGVEVIFYLSDR | 351. |
| | [Source HGNC | | | EPLRLGSGEYTAEELCIRAAQACRISPLCHNLFALYDENTKLWYAP | |
| | Symbol; Acc:HGNC: | | | NRTITVDDKMSLRLHYRMRFYFTNWHGTNDNEQSVWRHSP | |
| | 6190] | | | | |
| JAK1 | Janus kinase 1 | 3716 | 345 | MQYLNIKEDCNAMAFCAKMRSSKKTEVNLEAPEPGVEVIFYLSDR | 352. |
| | [Source HGNC | | | EPLRLGSGEYTAEELCIRAAQACRISPLCHNLFALYDENTKLWYAP | |
| | Symbol; Acc:HGNC: | | | NRTITVDDKMSLRLHYRMRFYFTNWHGTNDNEQSVWRHSPKKQK | |
| | 6190] | | | NGYEKKKIPDATPLLDASSLEYLFAQGQYDLVKCLAPIRDPKTEQD | |
| | | | | GHDIENECLGMAVLAISHYAMMKKMQLPELPKDISYKRYIPETLNK | |
| | | | | SIRQRNLLTRMRINNVFKDFLKEFNNKTICDSSVSTHDLKVKYLATL | |
| | | | | ETLTKHYGAEIFETSMLLISSENEMNWFHSNDGGNVLYYEVMVTG | |
| | | | | NLGIQWRHKPNVVSVEKEKNKLKRKK | |
| JAK1 | Janus kinase 1 | 3716 | 130 | MQYLNIKEDCNAMAFCAKMRSSKKTEVNLEAPEPGVEVIFYLSDR | 353. |
| | [Source HGNC | | | EPLRLGSGEYTAEELCIRAAQACRISPLCHNLFALYDENTKLWYAP | |
| | Symbol; Acc:HGNC: | | | NRTITVDDKMSLRLHYRMSLCSSGEATHYVWSPQPDAV* | |
| | 6190] | | | | |
| JAK1 | Janus kinase 1 | 3716 | 994 | XNDNEQSVWRHSPKKQKNGYEKKKIPDATPLLDASSLEYLFAQGQ | 354. |
| | [Source HGNC | | | YDLVKCLAPIRDPKTEQDGHDIENECLGMAVLAISHYAMMKKMQL | |
| | Symbol; Acc:HGNC: | | | PELPKDISSVSTHDLKVKYLATLETLTKHYGAEIFETSMLLISSENEM | |
| | 6190] | | | NWFHSNDGGNVLYYEVMVTGNLGIQWRHKPNVVSVEKEKNKLK | |
| | | | | RKKLENKHKKDEEKNKIREEWNNFSYFPEITHIVIKESVVSINKQDN | |
| | | | | KKMELKLSSHEEALSFVSLVDGYFRLTADAHHYLCTDVAPPLIVHN | |
| | | | | IQNGCHGPICTEYAINKLRQEGSEEGMYVLRWSCTDFDNILMTVTC | |
| | | | | FEKSEQVQGAQKQFKNFQIEVQKGRYSLHGSDRSFPSLGDLMSHLK | |
| | | | | KQILRTDNISFMLKRCCQPKPREISNLLVATKKAQEWQPVYPMSQL | |
| | | | | SFDRILKKDLVQGEHLGRGTRTHIYSGTLMDYKDDEGTSEEKKIKVI | |
| | | | | LKVLDPSHRDISLAFFEAASMMRQVSHKHIVYLYGVCVRDVENIM | |
| | | | | VEEFVEGGPLDLFMHRKSDVLTTPWKFKVAKQLASALSYLEDKDL | |
| | | | | VHGNVCTKNLLLAREGIDSECGPFIKLSDPGIPITVLSRQECIERIPWI | |
| | | | | APECVEDSKNLSVAADKWSFGTTLWEICYNGEIPLKDKTLIEKERF | |
| | | | | YESRCRPVTPSCKELADLMTRCMNYDPNQRPFFRAIMRDINKLEEQ | |
| | | | | NPDIVSEKKPATEVDPTHFEKRFLKRIRDLGEGHFGKVELCRYDPEG | |
| | | | | DNTGEQVAVKSLKPESGGNHIADLKKEIEILRNLYHENIVKYKGICT | |
| | | | | EDGGNGIKLIMEFLPSGSLKEYLPKNKNKINLKQQLKYAVQICKGM | |
| | | | | DYLGSRQYVHRDLAARNVLVESEHQVKIGDFGLTKAIETDKEYYT | |
| | | | | VKDDRDSPVFWYAPECLMQSKFYIASDVWSFGVTLHELLTYCDSD | |
| | | | | SSPMALFLKMIGPTHGQMTVTRLVNTLKEGKRLPCPPNCPDEVYQL | |
| | | | | MRKCWEFQPSNRTSFQNLIEGFEALLK* | |
| LRRC8C | leucine rich repeat | 84230 | 804 | MIPVTEFRQFSEQQPAFRVLKPWWDVFTDYLSVAMLMIGVFGCTL | 355. |
| | containing 8 VRAC | | | QVMQDKIICLPKRVQPAQNHSSLSNVSQAVASTTPLPPPKPSPANPIT | |
| | subunit C | | | VEMKGLKTDLDLQQYSFINQMCYERALHWYAKYFPYLVLIHTLVF | |
| | [Source:HGNC | | | MLCSNFWFKFPGSSSKIEHFISILGKCFDSPWTTRALSEVSGEDSEEK | |
| | Symbol; Acc:HGNC: | | | DNRKNNMNRSNTIQSGPEDSLVNSQSLKSIPEKFVVDKSTAGALDK | |
| | 25075] | | | KEGEQAKALFEKVKKFRLHVEEGDILYAMYVRQTVLKVIKFLIIIAY | |
| | | | | NSALVSKVQFTVDCNVDIQDMTGYKNFSCNHTMAHLFSKLSFCYL | |
| | | | | CFVSIYGLTCLYTLYWLFYRSLREYSFEYVRQETGIDDIPDVKNDFA | |
| | | | | FMLHMIDQYDPLYSKRFAVFLSEVSENKLKQLNLNNEWTPDKLRQ | |
| | | | | KLQTNAHNRLELPLIMLSGLPDTVFEITELQSLKLEIIKNVMIPATIA | |
| | | | | QLDNLQELSLHQCSVKIHSAALSFLKENLKVLSVKFDDMRELPPW | |
| | | | | MYGLRNLEELYLVGSLSHDISRNVTLESLRDLKSLKILSIKSNVSKIP | |
| | | | | QAVVDVSSHLQKMCIHNDGTKLVMLNNLKKMTNLTELELVHCDL | |
| | | | | ERIPHAVFSLLSLQELDLKENNLKSIEEIVSFQHLRKLTVLKLWHNSI | |
| | | | | TYIPEHIKKLTSLERLSFSHNKIEVLPSHLFLCNKIRYLDLSYNDIRFIP | |
| | | | | PEIGVLQSLQYFSITCNKVESLPDELYFCKKLKTLKIGKNSLSVLSPK | |
| | | | | IGNLLFLSYLDVKGNHFEILPPELGDCRALKRAGLVVEDALFETLPS | |
| | | | | DVREQMKTE* | |
| LRRC8C | leucine rich repeat | 84230 | 59 | MIPVTEFRQFSEQQPAFRVLKPWWDVFTDYLSVAMLMIGVFGCTL | 356. |
| | containing 8 VRAC | | | QAVSLKLSGFILF* | |
| | subunit C | | | | |
| | [Source:HGNC | | | | |
| | Symbol; Acc:HGNC: | | | | |
| | 25075] | | | | |
| GFI1 | growth factor | 2672 | 423 | MPRSFLVKSKKAHSYHQPRSPGPDYSLRLENVPAPSRADSTSNAGG | 357. |
| | independent 1 | | | AKAEPRDRLSPESQLTEAPDRASASPDSCEGSVCERSSEFEDFWRPP | |
| | transcriptional | | | SPSASPASEKSMCPSLDEAQPFPLPFKPYSWSGLAGSDLRHLVQSYR | |
| | repressor | | | PCGALERGAGLGLFCEPAPEPGHPAALYGPKRAAGGAGAGAPGSC | |
| | [Source:HGNC | | | SAGAGATAGPGLGLYGDFGSAAAGLYERPTAAAGLLYPERGHGLH | |
| | Symbol; Acc:HGNC: | | | ADKGAGVKVESELLCTRLLLGGGSYKCIKCSKVFSTPHGLEVHVRR | |
| | 4237] | | | SHSGTRPFACEMCGKTFGHAVSLEQHKAVHSQERSFDCKICGKSFK | |
| | | | | RSSTLSTHLLIHSDTRPYPCQYCGKRFHQKSDMKKHTFIHTGEKPHK | |
| | | | | CQVCGKAFSQSSNLITHSRKHTGFKPFGCDLCGKGFQRKVDLRRHR | |
| | | | | ETQHGLK* | |
| HPS3 | HPS3 biogenesis of | 84343 | 1005 | MVQLYNLHPFGSQQVVPCKLEPDRFCGGGRDALFVAAGCKVEAFA | 358. |
| | lysosomal organelles | | | VAGQELCQPRCAFSTLGRVLRLAYSEAGDYLVAIEEKNKATFLRAY | |
| | complex 2 subunit 1 | | | VNWRNKRTENSRVCIRMIGHNVEGPFSKAFRDQMYIIEMPLSEAPL | |
| | [Source:HGNC | | | CISCCPVKGDLLVGCTNKLVLFSLKYQIINEEFSLLDFERSLIIHIDNIT | |
| | Symbol; Acc:HGNC: | | | PVEVSFCVGYVAVMSDLEVLIVKLESGPKNGERVHHHPHKTNNRIR | |
| | 15597] | | | RTEEGISNEISQLESDDFVICQKPLELLGEKSEQSGLSVTLESTGLAD | |
| | | | | EKRKYSHFQHLLYRRFAPDISSYVLSDDIKLHSLQLLPIYQTGSLTSD | |
| | | | | GKNLSQEKELLSLFCFFSLPHVGYLYMVVKSVELMSVYQYPEKSQ | |
| | | | | QAVLTPQFLHVITSNNLQCFTVRCSAAAAREEDPYMDTTLKACPPV | |
| | | | | SMDVCALRIQLFIGLKAICHFKNHIILLTKAEPEAIPERRQSPKRLLSR | |
| | | | | KDTSVKIKIPPVAEAGWNLYIVNTISPVQLYKEMVDYSNTYKTVKT | |
| | | | | QSCIHLLSEAHLLVRAALMDASQLEPGEKAELLEAFKESCGHLGDC | |
| | | | | YSRLDSQHSHLTLPYYKMSGLSMAEVLARTDWTVEDGLQKYERG | |
| | | | | LIFYINHSLYENLDEELNEELAAKVVQMFYVAEPKQVPHILCSPSMK | |
| | | | | NINPLTAMSYLRKLDTSGFSSILVTLTKAAVALKMGDLDMHRNEM | |
| | | | | KSHSEMKLVCGFILEPRLLIQQRKGQIVPTELALHLKETQPGLLVAS | |
| | | | | VLGLQKNNKIGIEEADSFFKVLCAKDEDTIPQLLVDFWEAQLVACL | |
| | | | | PDVVLQELFFKLTSQYIWRLSKRQPPDTTPLRTSEDLINACSHYGLIY | |
| | | | | PWVHVVISSDSLADKNYTEDLSKLQSLICGPSFDIASIIPFLEPLSEDTI | |
| | | | | AGLSVHVLCRTRLKEYEQCIDILLERCPEAVIPYANHELKEENRTLW | |
| | | | | WKKLLPELCQRIKCGGEKYQLYLSSLKETLSIVAVELELKDFMNVL | |
| | | | | PEDGTATFFLPYLLYCSRKKPLT* | |
| HPS3 | HPS3 biogenesis of | 84343 | 840 | MVQLYNLHPFGSQQVVPCKLEPDRFCGGGRDALFVAAGCKVEAFA | 359. |
| | lysosomal organelles | | | VAGQELCQPRCAFSTLGRVLRLAYSEAGISNEISQLESDDFVICQKP | |
| | complex 2 subunit 1 | | | LELLGEKSEQSGLSVTLESTGLADEKRKYSHFQHLLYRRFAPDISSY | |
| | [Source:HGNC | | | VLSDDIKLHSLQLLPIYQTGSLTSDGKNLSQEKELLSLFCFFSLPHVG | |
| | Symbol; Acc:HGNC: | | | YLYMVVKSVELMSVYQYPEKSQQAVLTPQFLHVITSNNLQCFTVR | |
| | 15597] | | | CSAAAAREEDPYMDTTLKACPPVSMDVCALRIQLFIGLKAICHFKN | |
| | | | | HIILLTKAEPEAIPERRQSPKRLLSRKDTSVKIKIPPVAEAGWNLYIV | |
| | | | | NTISPVQLYKEMVDYSNTYKTVKTQSCIHLLSEAHLLVRAALMDAS | |
| | | | | QLEPGEKAELLEAFKESCGHLGDCYSRLDSQHSHLTLPYYKMSGLS | |
| | | | | MAEVLARTDWTVEDGLQKYERGLIFYINHSLYENLDEELNEELAA | |
| | | | | KVVQMFYVAEPKQVPHILCSPSMKNINPLTAMSYLRKLDTSGFSSIL | |
| | | | | VTLTKAAVALKMGDLDMHRNEMKSHSEMKLVCGFILEPRLLIQQR | |
| | | | | KGQIVPTELALHLKETQPGLLVASVLGLQKNNKIGIEEADSFFKVLC | |
| | | | | AKDEDTIPQLLVDFWEAQLVACLPDVVLQELFFKLTSQYIWRLSKR | |
| | | | | QPPDTTPLRTSEDLINACSHYGLIYPWVHVVISSDSLADKNYTEDLS | |
| | | | | KLQSLICGPSFDIASIIPFLEPLSEDTIAGLSVHVLCRTRLKEYEQCIDI | |
| | | | | LLERCPEAVIPYANHELKEENRTLWWKKLLPELCQRIKCGGEKYQL | |
| | | | | YLSSLKETLSIVAVELELKDFMNVLPEDGTATFFLPYLLYCSRKKPL | |
| | | | | T* | |
| HPS3 | HPS3 biogenesis of | 84343 | 267 | ELAAKVVQMFYVAEPKQVPHILCSPSMKNINPLTAMSYLRKLDTSG | 360. |
| | lysosomal organelles | | | FSSILVTLTKAAVALKMGDLDMHRNEMKSHSEMKLVCGFILEPRLL | |
| | complex 2 subunit 1 | | | IQQRKGQIVPTELALHLKETQPGLLVASVLGLQKNNKIGIEEADSFF | |
| | [Source:HGNC | | | KVLCAKDEDTIPQLLVDFWEAQLVACLPDVVLQELFFKLTSQYIWR | |
| | Symbol; Acc:HGNC: | | | LSKRQPPDTTPLRTSEDLINACSHYGLIYPWVHVVISSDSLADKNYT | |
| | 15597] | | | EDLSKLQLPLFRSWSHFQKTLLPASVSMFCVVHA* | |
| ZNF687 | zinc finger protein 687 | 57592 | 1238 | MGDMKTPDFDDLLAAFDIPDIDANEAIHSGPEENEGPGGPGKPEPG | 361. |
| | [Source:HGNC | | | VGSESEDTAAASAGDGPGVPAQASDHGLPPPDISVVSVIVKNTVCP | |
| | Symbol; Acc:HGNC: | | | EQSEALAGGSAGDGAQAAGVTKEGPVGPHRMQNGFGSPEPSLPGT | |
| | 29277] | | | PHSPAPPSGGTWKEKGMEGKTPLDLFAHFGPEPGDHSDPLPPSAPSP | |
| | | | | TREGALTPPPFPSSFELAQENGPGMQPPVSSPPLGALKQESCSPHHP | |
| | | | | QVLAQQGSGSSPKATDIPASASPPPVAGVPFFKQSPGHQSPLASPKV | |
| | | | | PVCQPLKEEDDDEGPVDKSSPGSPQSPSSGAEAADEDSNDSPASSSS | |
| | | | | RPLKVRIKTIKTSCGNITRTVTQVPSDPDPPAPLAEGAFLAEASLLKL | |
| | | | | SPATPTSEGPKVVSVQLGDGTRLKGTVLPVATIQNASTAMLMAASV | |
| | | | | ARKAVVLPGGTATSPKMIAKNVLGLVPQALPKADGRAGLGTGGQ | |
| | | | | KVNGASVVMVQPSKTATGPSTGGGTVISRTQSSLVEAFNKILNSKN | |
| | | | | LLPAYRPNLSPPAEAGLALPPTGYRCLECGDAFSLEKSLARHYDRRS | |
| | | | | MRIEVTCNHCARRLVFFNKCSLLLHAREHKDKGLVMQCSHLVMRP | |
| | | | | VALDQMVGQPDITPLLPVAVPPVSGPLALPALGKGEGAITSSAITTV | |
| | | | | AAEAPVLPLSTEPPAAPATSAYTCFRCLECKEQCRDKAGMAAHFQ | |
| | | | | QLGPPAPGATSNVCPTCPMMLPNRCSFSAHQRMHKNRPPHVCPEC | |
| | | | | GGNFLQANFQTHLREACLHVSRRVGYRCPSCSVVFGGVNSIKSHIQ | |
| | | | | TSHCEVFHKCPICPMAFKSGPSAHAHLYSQHPSFQTQQAKLIYKCA | |
| | | | | MCDTVFTHKPLLSSHFDQHLLPQRVSVFKCPSCPLLFAQKRTMLEH | |
| | | | | LKNTHQSGRLEETAGKGAGGALLTPKTEPEELAVSQGGAAPATEES | |
| | | | | SSSSEEEEVPSSPEPPRPAKRPRRELGSKGLKGGGGGPGGWTCGLCH | |
| | | | | SWFPERDEYVAHMKKEHGKSVKKFPCRLCERSFCSAPSLRRHVRV | |
| | | | | NHEGIKRVYPCRYCTEGKRTFSSRLILEKHVQVRHGLQLGAQSPGR | |
| | | | | GTTLARGSSARAQGPGRKRRQSSDSCSEEPDSTTPPAKSPRGGPGSG | |
| | | | | GHGPLRYRSSSSTEQSLMMGLRVEDGAQQCLDCGLCFASPGSLSRH | |
| | | | | RFISHKKRRGVGKASALGLGDGEEEAPPSRSDPDGGDSPLPASGGPL | |
| | | | | TCKVCGKSCDSPLNLKTHFRTHGMAFIRARQGAVGDN* | |
| ZNF687 | zinc finger protein 687 | 57592 | 100 | RTFSSRLILEKHVQVRHGLQLGAQSPGRGTTLARGSSARAQFLPLFF | 362. |
| | [Source:HGNC | | | RGQVGNAASLLTLAVRSLTARHRQPSPPGADLDLEAMALCATGAA | |
| | Symbol; Acc:HGNC: | | | APQNRAS* | |
| | 29277] | | | | |
| ZNF687 | zinc finger protein 687 | 57592 | 707 | XTVLPVATIQNASTAMLMAASVARKAVVLPGGTATSPKMIAKNVL | 363. |
| | [Source:HGNC | | | GLVPQALPKADGRAGLGTGGQKVNGASVVMVQPSKTATGPSTGG | |
| | Symbol; Acc:HGNC: | | | GTVISRTQSSLVEAFNKILNSKNLLPAYRPNLSPPAEAGLALPPTGYR | |
| | 29277] | | | CLECGDAFSLEKSLARHYDRRSMRIEVTCNHCARRLVFFNKCSLLL | |
| | | | | HAREHKDKGLVMQCSHLVMRPVALDQMVGQPDITPLLPVAVPPVS | |
| | | | | GPLALPALGKGEGAITSSAITTVAAEAPVLPLSTEPPAAPATSAYTCF | |
| | | | | RCLECKEQCRDKAGMAAHFQQLGPPAPGATSNVCPTCPMMLPNRC | |
| | | | | SFSAHQRMHKNRPPHVCPECGGNFLQANFQTHLREACLHVSRRVG | |
| | | | | YRCPSCSVVFGGVNSIKSHIQTSHCEVFHKCPICPMAFKSGPSAHAH | |
| | | | | LYSQHPSFQTQQAKLIYKCAMCDTVFTHKPLLSSHFDQHLLPQRVS | |
| | | | | VFKCPSCPLLFAQKRTMLEHLKNTHQSGRLEETAGKGAGGALLTP | |
| | | | | KTEPEELAVSQGGAAPATEESSSSSEEEEVPSSPEPPRPAKRPRRELG | |
| | | | | SKGLKGGGGGPGGWTCGLCHSWFPERDEYVAHMKKEHGKSVKKF | |
| | | | | PCRLCERSFCSAPSLRRHVRVNHEGIKRVYPCRSKGPGLRAVPLLPS | |
| | | | | CPLPFQVLHRGKTHLQQPPDPRETCPGPARLAAWGPVPWPGDHLG | |
| | | | | SGFQCQSPGARSETPPVF* | |
| ZNF687 | zinc finger protein 687 | 57592 | 786 | MGDMKTPDFDDLLAAFDIPDIDANEAIHSGPEENEGPGGPGKPEPG | 364. |
| | [Source:HGNC | | | VGSESEDTAAASAGDGPGVPAQASDHGLPPPDISVVSVIVKNTVCP | |
| | Symbol; Acc:HGNC: | | | EQSEALAGGSAGDGAQAAGVTKEGPVGPHRMQNGFGSPEPSLPGT | |
| | 29277] | | | PHSPAPPSGGTWKEKGMEGKTPLDLFAHFGPEPGDHSDPLPPSAPSP | |
| | | | | TREGALTPPPFPSSFELAQENGPGMQPPVSSPPLGALKQESCSPHHP | |
| | | | | QVLAQQGSGSSPKATDIPASASPPPVAGVPFFKQSPGHQSPLASPKV | |
| | | | | PVCQPLKEEDDDEGPVDKSSPGSPQSPSSGAEAADEDSNDSPASSSS | |
| | | | | RPLKVRIKTIKTSCGNITRTVTQVPSDPDPPAPLAEGAFLAEASLLKL | |
| | | | | SPATPTSEGPKVVSVQLGDGTRLKGTVLPVATIQNASTAMLMAASV | |
| | | | | ARKAVVLPGGTATSPKMIAKNVLGLVPQALPKADGRAGLGTGGQ | |
| | | | | KVNGASVVMVQPSKTATGPSTGGGTVISRTQSSLVEAFNKILNSKN | |
| | | | | LLPAYRPNLSPPAEAGLALPPTGYRCLECGDAFSLEKSLARHYDRRS | |
| | | | | MRIEVTCNHCARRLVFFNKCSLLLHAREHKDKGLVMQCSHLVMRP | |
| | | | | VALDQMVGQPDITPLLPVAVPPVSGPLALPALGKGEGAITSSAITTV | |
| | | | | AAEAPVLPLSTEPPAAPATSAYTCFRCLECKEQCRDKAGMAAHFQ | |
| | | | | QLGPPAPGATSNVCPTCPMMLPNRCSFSAHQRMHKNRPPHVCPEC | |
| | | | | GGNFLQANFQTHLREACLHVSRRVGYRTPISLGAWRRLLGKGPGV | |
| | | | | PC* | |
| ZNF687 | zinc finger protein 687 | 57592 | 147 | MGRGLGSADMGDMKTPDFDDLLAAFDIPDIDANEAIHSGPEENEGP | 365. |
| | [Source:HGNC | | | GGPGKPEPGVGSESEDTAAASAGDGPGVPAQASDHGLPPPDISVVS | |
| | Symbol; Acc:HGNC: | | | VIVKNTVCPEQSEALAGGSAGDGAQAAGVTKEGPVGPHRMQNGF | |
| | 29277] | | | GSPEPSLPGTP | |
| THY1 | Thy-1 cell surface | 7070 | 162 | MNLAISIALLLTVLQVSRGQKVTSLTACLVDQSLRLDCRHENTSSSP | 366. |
| | antigen [Source:HGNC | | | IQYEFSLTRETKKHVLFGTVGVPEHTYRSRTNFTSKYNMKVLYLSA | |
| | Symbol; Acc:HGNC: | | | FTSKDEGTYTCALHHSGHSPPISSQNVTVLRDKLVKCEGISLLAQNT | |
| | 11801] | | | SWLLLLLLSLSLLQATDFMSL* | |
| THY1 | Thy-1 cell surface | 7070 | 145 | MNLAISIALLLTVDQSLRLDCRHENTSSSPIQYEFSLTRETKKHVLFG | 367. |
| | antigen [Somce:HGNC | | | TVGVPEHTYRSRTNFTSKYNMKVLYLSAFTSKDEGTYTCALHHSG | |
| | Symbol; Acc:HGNC: | | | HSPPISSQNVTVLRDKLVKCEGISLLAQNTSWLLLLLLSLSLLQATD | |
| | 11801] | | | FMSL* | |
| THY1 | Thy-1 cell surface | 7070 | 153 | MNLAISIALLLTVLQVSRGQKVTSLTACLVDQSLRLDCRHENTSSSP | 368. |
| | antigen [Somce:HGNC | | | IQYEFSLTRETKKHVLFGTVGVPEHTYRSRTNFTSKYNMKVLYLSA | |
| | Symbol; Acc:HGNC: | | | FTSKDEGTYTCALHHSGHSPPISSQNVTVLRDKLVKCEGISLLAQNT | |
| | 11801] | | | SWLLLLLLSLSLL | |
| THY1 | Thy-1 cell surface | 7070 | 165 | MNLAISIALLLTVLQVSRGQKVTSLTACLVDQSLRLDCRHENTSSSP | 369. |
| | antigen [Source:HGNC | | | IQYEFSLTRETKKHVLFGTVGVPEHTYRSRTNFTSKYNMKVLYLSA | |
| | Symbol; Acc:HGNC: | | | FTSKDEGTYTCALHHSGHSPPISSQNVTVLRGHGFHVPVTGGAHGG | |
| | 11801] | | | DRKPQVPVQRSYFSESADPLPPIPQT | |
| THY1 | Thy-1 cell surface | 7070 | 38 | MNLAISIALLLTGLPRAEGDQPNGLPSGPEPSSGLPP* | 370. |
| | antigen [Source:HGNC | | | | |
| | Symbol; Acc:HGNC: | | | | |
| | 11801] | | | | |
| STAT1 | signal transducer and | 6772 | 751 | MSQWYELQQLDSKFLEQVHQLYDDSFPMEIRQYLAQWLEKQDWE | 371. |
| | activator of | | | HAANDVSFATIRFHDLLSQLDDQYSRFSLENNFLLQHNIRKSKRNL | |
| | transcription 1 | | | QDNFQEDPIQMSMIIYSCLKEERKILENAQRFNQAQSGNIQSTVMLD | |
| | [Source:HGNC | | | KQKELDSKVRNVKDKVMCIEHEIKSLEDLQDEYDFKCKTLQNREH | |
| | Symbol; Acc:HGNC: | | | ETNGVAKSDQKQEQLLLKKMYLMLDNKRKEWHKIIELLNVTELT | |
| | 11362] | | | QNALINDELVEWKRRQQSACIGGPPNACLDQLQNWFTIVAESLQQ | |
| | | | | VRQQLKKLEELEQKYTYEHDPITKNKQVLWDRTFSLFQQLIQSSFV | |
| | | | | VERQPCMPTHPQRPLVLKTGVQFTVKLRLLVKLQELNYNLKVKVL | |
| | | | | FDKDVNERNTVKGFRKFNILGTHTKVMNMEESTNGSLAAEFRHLQ | |
| | | | | LKEQKNAGTRTNEGPLIVTEELHSLSFETQLCQPGLVIDLETTSLPVV | |
| | | | | VISNVSQLPSGWASILWYNMLVAEPRNLSFFLTPPCARWAQLSEVL | |
| | | | | SWQFSSVTKRGLNVDQLNMLGEKLLGPNASPDGLIPWTRFCKENIN | |
| | | | | DKNFPFWLWIESILELIKKHLLPLWNDGCIMGFISKERERALLKDQQ | |
| | | | | PGTFLLRFSESSREGAITFTWVERSQNGGEPDFHAVEPYTKKELSAV | |
| | | | | TFPDIIRNYKVMAAENIPENPLKYLYPNIDKDHAFGKYYSRPKEAPE | |
| | | | | PMELDGPKGTGYIKTELISVSEVHPSRLQTTDNLLPMSPEEFDEVSRI | |
| | | | | VGSVEFDSMMNTV* | |
| STAT1 | signal transducer and | 6772 | 713 | MSQWYELQQLDSKFLEQVHQLYDDSFPMEIRQYLAQWLEKQDWE | 372. |
| | activator of | | | HAANDVSFATIRFHDLLSQLDDQYSRFSLENNFLLQHNIRKSKRNL | |
| | transcription 1 | | | QDNFQEDPIQMSMIIYSCLKEERKILENAQRFNQAQSGNIQSTVMLD | |
| | [Source:HGNC | | | KQKELDSKVRNVKDKVMCIEHEIKSLEDLQDEYDFKCKTLQNREH | |
| | Symbol; Acc:HGNC: | | | ETNGVAKSDQKQEQLLLKKMYLMLDNKRKEWHKIIELLNVTELT | |
| | 11362] | | | QNALINDELVEWKRRQQSACIGGPPNACLDQLQNWFTIVAESLQQ | |
| | | | | VRQQLKKLEELEQKYTYEHDPITKNKQVLWDRTFSLFQQLIQSSFV | |
| | | | | VERQPCMPTHPQRPLVLKTGVQFTVKLRLLVKLQELNYNLKVKVL | |
| | | | | FDKDVNERNTVKGFRKFNILGTHTKVMNMEESTNGSLAAEFRHLQ | |
| | | | | LKEQKNAGTRTNEGPLIVTEELHSLSFETQLCQPGLVIDLETTSLPVV | |
| | | | | VISNVSQLPSGWASILWYNMLVAEPRNLSFFLTPPCARWAQLSEVL | |
| | | | | SWQFSSVTKRGLNVDQLNMLGEKLLGPNASPDGLIPWTRFCKENIN | |
| | | | | DKNFPFWLWIESILELIKKHLLPLWNDGCIMGFISKERERALLKDQQ | |
| | | | | PGTFLLRFSESSREGAITFTWVERSQNGGEPDFHAVEPYTKKELSAV | |
| | | | | TFPDIIRNYKVMAAENIPENPLKYLYPNIDKDHAFGKYYSRPKEAPE | |
| | | | | PMELDGPKGTGYIKTELISVSEV* | |
| STAT1 | signal transducer and | 6772 | 715 | MWMSQWYELQQLDSKFLEQVHQLYDDSFPMEIRQYLAQWLEKQD | 373. |
| | activator of | | | WEHAANDVSFATIRFHDLLSQLDDQYSRFSLENNFLLQHNIRKSKR | |
| | transcription 1 | | | NLQDNFQEDPIQMSMIIYSCLKEERKILENAQRFNQAQSGNIQSTVM | |
| | [Source:HGNC | | | LDKQKELDSKVRNVKDKVMCIEHEIKSLEDLQDEYDFKCKTLQNR | |
| | Symbol; Acc:HGNC: | | | EHETNGVAKSDQKQEQLLLKKMYLMLDNKRKEVVHKIIELLNVTE | |
| | 11362] | | | LTQNALINDELVEWKRRQQSACIGGPPNACLDQLQNWFTIVAESLQ | |
| | | | | QVRQQLKKLEELEQKYTYEHDPITKNKQVLWDRTFSLFQQLIQSSF | |
| | | | | VVERQPCMPTHPQRPLVLKTGVQFTVKLRLLVKLQELNYNLKVKV | |
| | | | | LFDKDVNERNTVKGFRKFNILGTHTKVMNMEESTNGSLAAEFRHL | |
| | | | | QLKEQKNAGTRTNEGPLIVTEELHSLSFETQLCQPGLVIDLETTSLPV | |
| | | | | VVISNVSQLPSGWASILWYNMLVAEPRNLSFFLTPPCARWAQLSEV | |
| | | | | LSWQFSSVTKRGLNVDQLNMLGEKLLGPNASPDGLIPWTRFCKENI | |
| | | | | NDKNFPFWLWIESILELIKKHLLPLWNDGCIMGFISKERERALLKDQ | |
| | | | | QPGTFLLRFSESSREGAITFTWVERSQNGGEPDFHAVEPYTKKELSA | |
| | | | | VTFPDIIRNYKVMAAENIPENPLKYLYPNIDKDHAFGKYYSRPKEAP | |
| | | | | EPMELDGPKGTGYIKTELISVSEV* | |
| STAT1 | signal transducer and | 6772 | 150 | MSQWYELQQLDSKFLEQVHQLYDDSFPMEIRQYLAQWLEKQDWE | 374. |
| | activator of | | | HAANDVSFATIRFHDLLSQLDDQYSRFSLENNFLLQHNIRKSKRNL | |
| | transcription 1 | | | QDNFQEDPIQMSMIIYSCLKEERKILENAQRFNQAQSGNIQSTVMLD | |
| | [Source:HGNC | | | KQKELDSKVRNVK | |
| | Symbol; Acc:HGNC: | | | | |
| | 11362] | | | | |
| STAT1 | signal transducer and | 6772 | 194 | MSQWYELQQLDSKFLEQVHQLYDDSFPMEIRQYLAQWLEKQDWE | 375. |
| | activator of | | | HAANDVSFATIRFHDLLSQLDDQYSRFSLENNFLLQHNIRKSKRNL | |
| | transcription 1 | | | QDNFQEDPIQMSMIIYSCLKEERKILENAQRFNQAQSGNIQSTVMLD | |
| | [Source:HGNC | | | KQKELDSKVRNVKDKVMCIEHEIKSLEDLQDEYDFKCKTLQNRGS | |
| | Symbol; Acc:HGNC: | | | SSQNNRVAECH* | |
| | 11362] | | | | |
| STAT1 | signal transducer and | 6772 | 70 | MSQWYELQQLDSKFLEQVHQLYDDSFPMEIRQYLAQWLEKQDWE | 376. |
| | activator of | | | HAANDVSFATIRFHDLLSQLDDQYSR | |
| | transcription 1 | | | | |
| | [Source HGNC | | | | |
| | Symbol; Acc:HGNC: | | | | |
| | 11362] | | | | |
| STAT1 | signal transducer and | 6772 | 43 | MSQWYELQQLDSKFLEQVHQLYDDSFPMEIRQYLAQWLEKQD* | 377. |
| | activator of | | | | |
| | transcription 1 | | | | |
| | [Source:HGNC | | | | |
| | Symbol; Acc:HGNC: | | | | |
| | 11362] | | | | |
| STAT1 | signal transducer and | 6772 | 377 | MSQWYELQQLDSKFLEQVHQLYDDSFPMEIRQYLAQWLEKQDWE | 378. |
| | activator of | | | HAANDVSFATIRFHDLLSQLDDQYSRFSLENNFLLQHNIRKSKRNL | |
| | transcription 1 | | | QDNFQEDPIQMSMIIYSCLKEERKILENAQRFNQCIEHEIKSLEDLQD | |
| | [Source:HGNC | | | EYDFKCKTLQNREHETNGVAKSDQKQEQLLLKKMYLMLDNKRKE | |
| | Symbol; Acc:HGNC: | | | VVHKIIELLNVTELTQNALINDELVEWKRRQQSACIGGPPNACLDQ | |
| | 11362] | | | LQNWFTIVAESLQQVRQQLKKLEELEQKYTYEHDPITKNKQVLWD | |
| | | | | RTFSLFQQLIQSSFVVERQPCMPTHPQRPLVLKTGVQFTVKLRLLVK | |
| | | | | LQELNYNLKVKVLFDKDVNERNTVKGFRKFNILGTHTKVMNMEES | |
| | | | | TNGSLAAEFRHL | |
| STAT1 | signal transducer and | 6772 | 573 | MSQWYELQQLDSKFLEQVHQLYDDSFPMEIRQYLAQWLEKQDWE | 379. |
| | activator of | | | HAANDVSFATIRFHDLLSQLDDQYSRFSLENNFLLQHNIRKSKRNL | |
| | transcription 1 | | | QDNFQEDPIQMSMIIYSCLKEERKILENAQRFNQAQSGNIQSTVMLD | |
| | [Source:HGNC | | | KQKELDSKVRNVKDKVMCIEHEIKSLEDLQDEYDFKCKTLQNREH | |
| | Symbol; Acc:HGNC: | | | ETNGVAKSDQKQEQLLLKKMYLMLDNKRKEWHKIIELLNVTELT | |
| | 11362] | | | QNALINDELVEWKRRQQSACIGGPPNACLDQLQNWFTIVAESLQQ | |
| | | | | VRQQLKKLEELEQKYTYEHDPITKNKQVLWDRTFSLFQQLIQSSFV | |
| | | | | VERQPCMPTHPQRPLVLKTGVQFTVKLRLLVKLQELNYNLKVKVL | |
| | | | | FDKDVNERNTVKGFRKFNILGTHTKVMNMEESTNGSLAAEFRHLQ | |
| | | | | LKEQKNAGTRTNEGPLIVTEELHSLSFETQLCQPGLVIDLETTSLPVV | |
| | | | | VISNVSQLPSGWASILWYNMLVAEPRNLSFFLTPPCARWAQLSEVL | |
| | | | | SWQFSSVTKRGLNVDQLNMLGEKLLGPNASPDGLIPWTRFCKVHH | |
| | | | | GLHQQGARACPVEGPAAGDLPAAVQ* | |
| STAT1 | signal transducer and | 6772 | 27 | RQYLAQWLEKQDWSLSSFRRPLCPLW* | 380. |
| | activator of | | | | |
| | transcription 1 | | | | |
| | [Source:HGNC | | | | |
| | Symbol; Acc:HGNC: | | | | |
| | 11362] | | | | |
| STAT1 | signal transducer and | 6772 | 749 | MSQWYELQQLDSKFLEQVHQLYDDSFPMEIRQYLAQWLEKQDWE | 381. |
| | activator of | | | HAANDVSFATIRFHDLLSQLDDQYSRFSLENNFLLQHNIRKSKRNL | |
| | transcription 1 | | | QDNFQEDPIQMSMIIYSCLKEERKILENAQRFNQAQSGNIQSTVMLD | |
| | [Source:HGNC | | | KQKELDSKVRNVKDKVMCIEHEIKSLEDLQDEYDFKCKTLQNREH | |
| | Symbol; Acc:HGNC: | | | ETNGVAKSDQKQEQLLLKKMYLMLDNKRKEVVHKIIELLNVTELT | |
| | 11362] | | | QNALINDELVEWKRRQQSACIGGPPNACLDQLQNWFTIVAESLQQ | |
| | | | | VRQQLKKLEELEQKYTYEHDPITKNKQVLWDRTFSLFQQLIQSSFV | |
| | | | | VERQPCMPTHPQRPLVLKTGVQFTVKLRLLVKLQELNYNLKVKVL | |
| | | | | FDKDVNERNTVKGFRKFNILGTHTKVMNMEESTNGSLAAEFRHLQ | |
| | | | | LKEQKNAGTRTNEGPLIVTEELHSLSFETQLCQPGLVIDLETTSLPVV | |
| | | | | VISNVSQLPSGWASILWYNMLVAEPRNLSFFLTPPCARWAQLSEVL | |
| | | | | SWQFSSVTKRGLNVDQLNMLGEKLLGPNASPDGLIPWTRFCKENIN | |
| | | | | DKNFPFWLWIESILELIKKHLLPLWNDGCIMGFISKERERALLKDQQ | |
| | | | | PGTFLLRFSESSREGAITFTWVERSQNGGEPDFHAVEPYTKKELSAV | |
| | | | | TFPDIIRNYKVMAAENIPENPLKYLYPNIDKDHAFGKYYSRPKEAPE | |
| | | | | PMELDGPKGTGYIKTELISVSEVHPSRLQTTDNLLPMSPEEFDEVSRI | |
| | | | | VGSVEFDSMSF* | |
| STAT1 | signal transducer and | 6772 | 792 | MSQWYELQQLDSKFLEQVHQLYDDSFPMEIRQYLAQWLEKQDWE | 382. |
| | activator of | | | HAANDVSFATIRFHDLLSQLDDQYSRFSLENNFLLQHNIRKSKRNL | |
| | transcription 1 | | | QDNFQEDPIQMSMIIYSCLKEERKILENAQRFNQAQSGNIQSTVMLD | |
| | [Source:HGNC | | | KQKELDSKVRNVKDKVMCIEHEIKSLEDLQDEYDFKCKTLQNREH | |
| | Symbol; Acc:HGNC: | | | ETNGVAKSDQKQEQLLLKKMYLMLDNKRKEWHKIIELLNVTELT | |
| | 11362] | | | QNALINDELVEWKRRQQSACIGGPPNACLDQLQNWFTIVAESLQQ | |
| | | | | VRQQLKKLEELEQKYTYEHDPITKNKQVLWDRTFSLFQQLIQSSFV | |
| | | | | VERQPCMPTHPQRPLVLKTGVQFTVKLRLLVKLQELNYNLKVKVL | |
| | | | | FDKDVNERNTVKGFRKFNILGTHTKVMNMEESTNGSLAAEFRHLQ | |
| | | | | LKEQKNAGTRTNEGPLIVTEELHSLSFETQLCQPGLVIDLETTSLPVV | |
| | | | | VISNVSQLPSGWASILWYNMLVAEPRNLSFFLTPPCARWAQLSEVL | |
| | | | | SWQFSSVTKRGLNVDQLNMLGEKLLGPNASPDGLIPWTRFCKENIN | |
| | | | | DKNFPFWLWIESILELIKKHLLPLWNDGCIMGFISKERERALLKDQQ | |
| | | | | PGTFLLRFSESSREGAITFTWVERSQNGGEPDFHAVEPYTKKELSAV | |
| | | | | TFPDIIRNYKVMAAENIPENPLKYLYPNIDKDHAFGKYYSRPKEAPE | |
| | | | | PMELDGPKGTGYIKTELISVSEVHPSRLQTTDNLLPMSPEEFDEVSRI | |
| | | | | VGSVEFDSMVSTTAGLCVALNKCVCSEAGSAPWQIPGLSAGGSPG | |
| | | | | GAKESAVLR* | |
| STAT1 | signal transducer and | 6772 | 749 | MSQWYELQQLDSKFLEQVHQLYDDSFPMEIRQYLAQWLEKQDWE | 383. |
| | activator of | | | HAANDVSFATIRFHDLLSQLDDQYSRFSLENNFLLQHNIRKSKRNL | |
| | transcription 1 | | | QDNFQEDPIQMSMIIYSCLKEERKILENAQRFNQAQSGNIQSTVMLD | |
| | [Source:HGNC | | | KQKELDSKVRNVKDKVMCIEHEIKSLEDLQDEYDFKCKTLQNREH | |
| | Symbol; Acc:HGNC: | | | ETNGVAKSDQKQEQLLLKKMYLMLDNKRKEVVHKIIELLNVTELT | |
| | 11362] | | | QNALINDELVEWKRRQQSACIGGPPNACLDQLQNWFTIVAESLQQ | |
| | | | | VRQQLKKLEELEQKYTYEHDPITKNKQVLWDRTFSLFQQLIQSSFV | |
| | | | | VERQPCMPTHPQRPLVLKTGVQFTVKLRLLVKLQELNYNLKVKVL | |
| | | | | FDKDVNERNTVKGKFNILGTHTKVMNMEESTNGSLAAEFRHLQLK | |
| | | | | EQKNAGTRTNEGPLIVTEELHSLSFETQLCQPGLVIDLETTSLPVVVI | |
| | | | | SNVSQLPSGWASILWYNMLVAEPRNLSFFLTPPCARWAQLSEVLS | |
| | | | | WQFSSVTKRGLNVDQLNMLGEKLLGPNASPDGLIPWTRFCKENIN | |
| | | | | DKNFPFWLWIESILELIKKHLLPLWNDGCIMGFISKERERALLKDQQ | |
| | | | | PGTFLLRFSESSREGAITFTWVERSQNGGEPDFHAVEPYTKKELSAV | |
| | | | | TFPDIIRNYKVMAAENIPENPLKYLYPNIDKDHAFGKYYSRPKEAPE | |
| | | | | PMELDGPKGTGYIKTELISVSEVHPSRLQTTDNLLPMSPEEFDEVSRI | |
| | | | | VGSVEFDSMMNTV* | |
| STAT1 | signal transducer and | 6772 | 274 | MSQWYELQQLDSKFLEQVHQLYDDSFPMEIRQYLAQWLEKQDWE | 384. |
| | activator of | | | HAANDVSFATIRFHDLLSQLDDQYSRFSLENNFLLQHNIRKSKRNL | |
| | transcription 1 | | | QDNFQEDPIQMSMIIYSCLKEERKILENAQRFNQAQSGNIQSTVMLD | |
| | [Source:HGNC | | | KQKELDSKVRNVKDKVMCIEHEIKSLEDLQDEYDFKCKTLQNREH | |
| | Symbol; Acc:HGNC: | | | ETNGVAKSDQKQEQLLLKKMYLMLDNKRKEVVHKIIELLNVTELT | |
| | 11362] | | | QNALINDELVEWKRRQQSACIGGPPNACLDQLQNCCGESAASSAA | |
| | | | | A* | |
| STAT1 | signal transducer and | 6772 | 717 | MSQWYELQQLDSKFLEQVHQLYDDSFPMEIRQYLAQWLEKQDWE | 385. |
| | activator of | | | HAANDVSFATIRFHDLLSQLDDQYSRFSLENNFLLQHNIRKSKRNL | |
| | transcription 1 | | | QDNFQEDPIQMSMIIYSCLKEERKILENAQRFNQAQSGNIQSTVMLD | |
| | [Source:HGNC | | | KQKELDSKVRNVKDKVMCIEHEIKSLEDLQDEYDFKCKTLQNREH | |
| | Symbol; Acc:HGNC: | | | ETNGVAKSDQKQEQLLLKKMYLMLDNKRKEVVHKIIELLNVTELT | |
| | 11362] | | | QNALINDELVEWKRRQQSACIGGPPNACLDQLQNWFTIVAESLQQ | |
| | | | | VRQQLKKLEELEQKYTYEHDPITKNKQVLWDRTFSLFQQLIQSSFV | |
| | | | | VERQPCMPTHPQRPLVLKTGVQFTVKLRLLVKLQELNYNLKVKVL | |
| | | | | FDKDVNERNTVKGFRKFNILGTHTKVMNMEESTNGSLAAEFRHLQ | |
| | | | | LKEQKNAGTRTNEGPLIVTEELHSLSFETQLCQPGLVIDLETTSLPVV | |
| | | | | VISNVSQLPSGWASILWYNMLVAEPRNLSFFLTPPCARWAQLSEVL | |
| | | | | SWQFSSVTKRGLNVDQLNMLGEKLLGPNASPDGLIPWTRFCKENIN | |
| | | | | DKNFPFWLWIESILELIKKHLLPLWNDGCIMGFISKERERALLKDQQ | |
| | | | | PGTFLLRFSESSREGAITFTWVERSQNGGEPDFHAVEPYTKKELSAV | |
| | | | | TFPDIIRNYKVMAAENIPENPLKYLYPNIDKDHAFGKYYSRPKEAPE | |
| | | | | PMELDGPKGTGYIKTELISVSEVTVLG* | |
| STAT1 | signal transducer and | 6772 | 637 | MSQWYELQQLDSKFLEQVHQLYDDSFPMEIRQYLAQWLEKQDWE | 386. |
| | activator of | | | HAANDVSFATIRFHDLLSQLDDQYSRFSLENNFLLQHNIRKSKRNL | |
| | transcription 1 | | | QDNFQEDPIQMSMIIYSCLKEERKILENAQRFNQAQSGNIQSTVMLD | |
| | [Source:HGNC | | | KQKELDSKVRNVKDKVMCIEHEIKSLEDLQDEYDFKCKTLQNREH | |
| | Symbol; Acc:HGNC: | | | ETNGVAKSDQKQEQLLLKKMYLMLDNKRKEVVHKIIELLNVTELT | |
| | 11362] | | | QNALINDELVEWKRRQQSACIGGPPNACLDQLQNWFTIVAESLQQ | |
| | | | | VRQQLKKLEELEQKYTYEHDPITKNKQVLWDRTFSLFQQLIQSSFV | |
| | | | | VERQPCMPTHPQRPLVLKTGVQFTVKLRLLVKLQELNYNLKVKVL | |
| | | | | FDKDVNERNTVKGFRKFNILGTHTKVMNMEESTNGSLAAEFRHLQ | |
| | | | | LKEQKNAGTRTNEGPLIVTEELHSLSFETQLCQPGLVIDLETTSLPVV | |
| | | | | VISNVSQLPSGWASILWYNMLVAEPRNLSFFLTPPCARWAQLSEVL | |
| | | | | SWQFSSVTKRGLNVDQLNMLGEKLLGPNASPDGLIPWTRFCKENIN | |
| | | | | DKNFPFWLWIESILELIKKHLLPLWNDGCIMGFISKERERALLKDQQ | |
| | | | | PGTFLLRFSESSREGAITFTWVERSQNGGGLLSADQGCESM* | |
| STAT1 | signal transducer and | 6772 | 780 | MSQWYELQQLDSKFLEQVHQLYDDSFPMEIRQYLAQWLEKQDWE | 387. |
| | activator of | | | HAANDVSFATIRFHDLLSQLDDQYSRFSLENNFLLQHNIRKSKRNL | |
| | transcription 1 | | | QDNFQEDPIQMSMIIYSCLKEERKILENAQRFNQAQSGNIQSTVMLD | |
| | [Source:HGNC | | | KQKELDSKVRNVKDKVMCIEHEIKSLEDLQDEYDFKCKTLQNREH | |
| | Symbol; Acc:HGNC: | | | ETNGVAKSDQKQEQLLLKKMYLMLDNKRKEVVHKIIELLNVTELT | |
| | 11362] | | | QNALINDELVEWKRRQQSACIGGPPNACLDQLQNWFTIVAESLQQ | |
| | | | | VRQQLKKLEELEQKYTYEHDPITKNKQVLWDRTFSLFQQLIQSSFV | |
| | | | | VERQPCMPTHPQRPLVLKTGVQFTVKLRLLVKLQELNYNLKVKVL | |
| | | | | FDKDVNERNTVKGFRKFNILGTHTKVMNMEESTNGSLAAEFRHLQ | |
| | | | | LKEQKNAGTRTNEGPLIVTEELHSLSFETQLCQPGLVIDLETTSLPVV | |
| | | | | VISNVSQLPSGWASILWYNMLVAEPRNLSFFLTPPCARWAQLSEVL | |
| | | | | SWQFSSVTKRGLNVDQLNMLGEKLLGPNASPDGLIPWTRFCKENIN | |
| | | | | DKNFPFWLWIESILELIKKHLLPLWNDGCIMGFISKERERALLKDQQ | |
| | | | | PGTFLLRFSESSREGAITFTWVERSQNGGEPDFHAVEPYTKKELSAV | |
| | | | | TFPDIIRNYKVMAAENIPENPLKYLYPNIDKDHAFGKYYSRPKEAPE | |
| | | | | PMELDGPKGTGYIKTELISVSEVHPSRLQTTDNLLPMSPEEFDEVSRI | |
| | | | | VGSVEFDSMALALLPRLECRAAIMAHCSLDLPSSTDPPNSAS* | |
| MPC2 | mitochondrial pyruvate | 25874 | 128 | MSAAGARGLRATYHRLLDKVELMLPEKLRPLYNHPAGPRTVFFWA | 388. |
| | carrier 2 | | | PIMKWGLVCAGLADMARPAEKLSTAQSAVLMATGFIWSRYSLVIIP | |
| | [Source:HGNC | | | KNWSLFAVNFFVGAAGASQLFRIWRYNQELKAKAHK* | |
| | Symbol; Acc:HGNC: | | | | |
| | 24515] | | | | |
| MPC2 | mitochondrial pyruvate | 25874 | 105 | MSAAGARGLRATYHRLLDKVELMLPEKLRPLYNHPAGPRTVFFWA | 389. |
| | carrier 2 | | | PIMKWGLVCAGLADMARPAEKLSTAQSAVLMATGFIWSRYSLVIIP | |
| | [Source:HGNC | | | KNWSLFAVNFFVGA | |
| | Symbol; Acc:HGNC: | | | | |
| | 24515] | | | | |
| PNKD | PNKD metallo-beta- | 25953 | 143 | MAAVVAATALKGRGARNARVLRGILAGATANKASHNRTRALQSH | 390. |
| | lactamase domain | | | SSPEGKEEPEPLSPELEYIPRKRGKNPMKAVGLAWAIGFPCGILLFIL | |
| | containing | | | TKREVDKDRVKQMKARQNMRLSNTGEYESQRFRASSQSAPSPDVG | |
| | [Source:HGNC | | | SGVQT* | |
| | Symbol; Acc:HGNC: | | | | |
| | 9153] | | | | |
| PNKD | PNKD metallo-beta- | 25953 | 362 | MAWQGWPAAWQWVAGCWLLLVLVLVLLVSPRGCRARRGLRGLL | 391. |
| | lactamase domain | | | MAHSQRLLFRIGYSLYTRTWLGYLFYRQQLRRARNRYPKGHSKTQ | |
| | containing | | | PRLFNGVKVLPIPVLSDNYSYLIIDTQAQLAVAVDPSDPRAVQASIE | |
| | [Source:HGNC | | | KEGVTLVAILCTHKHWDHSGGNRDLSRRHRDCRVYGSPQDGIPYL | |
| | Symbol; Acc:HGNC: | | | THPLCHQDVVSVGRLQIRALATPGHTQGHLVYLLDGEPYKGPSCLF | |
| | 9153] | | | SGDLLFLSGCGRTFEGNAETMLSSLDTVLGLGDDTLLWPGHEYAEE | |
| | | | | NLGFAGVVEPENLARERKMQWVQRQRLERKGTCPSTLGEERSYNP | |
| | | | | FLRTHCLALQEALGPGPGPTGDDDYSRAQLLEELRRLKDMHKSK* | |
| PNKD | PNKD metallo-beta- | 25953 | 386 | MAAVVAATALKGRGARNARVLRGILAGATANKASHNRTRALQSH | 392. |
| | lactamase domain | | | SSPEGKEEPEPLSPELEYIPRKRGKNPMKAVGLAWYSLYTRTWLGY | |
| | containing | | | LFYRQQLRRARNRYPKGHSKTQPRLFNGVKVLPIPVLSDNYSYLIID | |
| | [Source:HGNC | | | TQAQLAVAVDPSDPRAVQASIEKEGVTLVAILCTHKHWDHSGGNR | |
| | Symbol; Acc:HGNC: | | | DLSRRHRDCRVYGSPQDGIPYLTHPLCHQDVVSVGRLQIRALATPG | |
| | 9153] | | | HTQGHLVYLLDGEPYKGPSCLFSGDLLFLSGCGRTFEGNAETMLSS | |
| | | | | LDTVLGLGDDTLLWPGHEYAEENLGFAGVVEPENLARERKMQWV | |
| | | | | QRQRLERKGTCPSTLGEERSYNPFLRTHCLALQEALGPGPGPTGDD | |
| | | | | DYSRAQLLEELRRLKDMHKSK* | |
| PNKD | PNKD metallo-beta- | 25953 | 326 | MPSSVHHTKRQMMSIYCYWYSLYTRTWLGYLFYRQQLRRARNRY | 393. |
| | lactamase domain | | | PKGHSKTQPRLFNGVKVLPIPVLSDNYSYLIIDTQAQLAVAVDPSDP | |
| | containing | | | RAVQASIEKEGVTLVAILCTHKHWDHSGGNRDLSRRHRDCRVYGS | |
| | [Source:HGNC | | | PQDGIPYLTHPLCHQDVVSVGRLQIRALATPGHTQGHLVYLLDGEP | |
| | Symbol; Acc:HGNC: | | | YKGPSCLFSGDLLFLSGCGRTFEGNAETMLSSLDTVLGLGDDTLLW | |
| | 9153] | | | PGHEYAEENLGFAGVVEPENLARERKMQWVQRQRLERKGTCPSTL | |
| | | | | GEERSYNPFLRTHCLALQEALGPGPGPTGDDDYSRAQLLEELRRLK | |
| | | | | DMHKSK* | |
| ACSL3 | acyl-CoA synthetase | 2181 | 721 | MNNHVSSKPSTMKLKHTINPILLYFIHFLISLYTILTYIPFYFFSESRQE | 394. |
| | long chain family | | | KSNRIKAKPVNSKPDSAYRSVNSLDGLASVLYPGCDTLDKVFTYAK | |
| | member 3 | | | NKFKNKRLLGTREVLNEEDEVQPNGKIFKKVILGQYNWLSYEDVF | |
| | [Source:HGNC | | | VRAFNFGNGLQMLGQKPKTNIAIFCETRAEWMIAAQACFMYNFQL | |
| | Symbol; Acc:HGNC: | | | VTLYATLGGPAIVHALNETEVTNIITSKELLQTKLKDIVSLVPRLRHII | |
| | 3570] | | | TVDGKPPTWSEFPKGIIVHTMAAVEALGAKASMENQPHSKPLPSDI | |
| | | | | AVIMYTSGSTGLPKGVMISHSNIIAGITGMAERIPELGEEDVYIGYLP | |
| | | | | LAHVLELSAELVCLSHGCRIGYSSPQTLADQSSKIKKGSKGDTSML | |
| | | | | KPTLMAAVPEIMDRIYKNVMNKVSEMSSFQRNLFILAYNYKMEQIS | |
| | | | | KGRNTPLCDSFVFRKVRSLLGGNIRLLLCGGAPLSATTQRFMNICFC | |
| | | | | CPVGQGYGLTESAGAGTISEVWDYNTGRVGAPLVCCEIKLKNWEE | |
| | | | | GGYFNTDKPHPRGEILIGGQSVTMGYYKNEAKTKADFFEDENGQR | |
| | | | | WLCTGDIGEFEPDGCLKIIDRKKDLVKLQAGEYVSLGKVEAALKNL | |
| | | | | PLVDNICAYANSYHSYVIGFVVPNQKELTELARKKGLKGTWEELC | |
| | | | | NSCEMENEVLKVLSEAAISASLEKFEIPVKIRLSPEPWTPETGLVTDA | |
| | | | | FKLKRKELKTHYQADIERMYGRK* | |
| ACSL3 | acyl-CoA synthetase | 2181 | 19 | XEQISKGRNTPLCDRWIL* | 395. |
| | long chain family | | | | |
| | member 3 | | | | |
| | [Source:HGNC | | | | |
| | Symbol; Acc:HGNC: | | | | |
| | 3570] | | | | |
| ACSL3 | acyl-CoA synthetase | 2181 | 88 | MNNHVSSKPSTMKLKHTINPILLYFIHFLISLYTILTYIPFYFFSESRQE | 396. |
| | long chain family | | | KSNRIKAKPVNSKPDSAYRSVNSLDGLASVLYPGCDTL | |
| | member 3 | | | | |
| | [Source:HGNC | | | | |
| | Symbol; Acc:HGNC: | | | | |
| | 3570] | | | | |
| ACSL3 | acyl-CoA synthetase | 2181 | 95 | MNNHVSSKPSTMKLKHTINPILLYFIHFLISLYTILTYIPFYFFSESRQE | 397. |
| | long chain family | | | KSNRIKAKPVNSKPDSAYRSVNSLDGLASVLYPGCDTLDKVFTYA | |
| | member 3 | | | | |
| | [Source:HGNC | | | | |
| | Symbol; Acc:HGNC: | | | | |
| | 3570] | | | | |
| ACSL3 | acyl-CoA synthetase | 2181 | 141 | MLGQKPKTNIAIFCETRAEWMIAAQACFMYNFQLVTLYATLGGPAI | 398. |
| | long chain family | | | VHALNETEVTNIITSKELLQTKLKDIVSLVPRLRHIITVDGKPPTWSE | |
| | member 3 | | | FPKGIIVHTMAAVEALGAKASMENQPHSKPLPSDIAVIMYTSGSTGL | |
| | [Source:HGNC | | | | |
| | Symbol; Acc:HGNC: | | | | |
| | 3570] | | | | |
| HDAC4 | histone deacetylase 4 | 9759 | 1085 | MSSQSHPDGLSGRDQPVELLNPARVNHMPSTVDVATALPLQVAPS | 399. |
| | [Source:HGNC | | | AVPMDLRLDHQFSLPVAEPALREQQLQQELLALKQKQQIQRQILIA | |
| | Symbol; Acc:HGNC: | | | EFQRQHEQLSRQHEAQLHEHIKQQQEMLAMKHQQELLEHQRKLER | |
| | 14063] | | | HRQEQELEKQHREQKLQQLKNKEKGKESAVASTEVKMKLQEFVL | |
| | | | | NKKKALAHRNLNHCISSDPRYWYGKTQHSSLDQSSPPQSGVSTSYN | |
| | | | | HPVLGMYDAKDDFPLRKTASEPNLKLRSRLKQKVAERRSSPLLRRK | |
| | | | | DGPVVTALKKRPLDVTDSACSSAPGSGPSSPNNSSGSVSAENGIAPA | |
| | | | | VPSIPAETSLAHRLVAREGSAAPLPLYTSPSLPNITLGLPATGPSAGT | |
| | | | | AGQQDAERLTLPALQQRLSLFPGTHLTPYLSTSPLERDGGAAHSPLL | |
| | | | | QHMVLLEQPPAQAPLVTGLGALPLHAQSLVGADRVSPSIHKLRQHR | |
| | | | | PLGRTQSAPLPQNAQALQHLVIQQQHQQFLEKHKQQFQQQQLQMN | |
| | | | | KIIPKPSEPARQPESHPEETEEELREHQALLDEPYLDRLPGQKEAHA | |
| | | | | QAGVQVKQEPIESDEEEAEPPREVEPGQRQPSEQELLFRQQALLLEQ | |
| | | | | QRIHQLRNYQASMEAAGIPVSFGGHRPLSRAQSSPASATFPVSVQEP | |
| | | | | PTKPRFTTGLVYDTLMLKHQCTCGSSSSHPEHAGRIQSIWSRLQETG | |
| | | | | LRGKCECIRGRKATLEELQTVHSEAHTLLYGTNPLNRQKLDSKKLL | |
| | | | | GSLASVFVRLPCGGVGVDSDTIWNEVHSAGAARLAVGCVVELVFK | |
| | | | | VATGELKNGFAVVRPPGHHAEESTPMGFCYFNSVAVAAKLLQQRL | |
| | | | | SVSKILIVDWDVHHGNGTQQAFYSDPSVLYMSLHRYDDGNFFPGS | |
| | | | | GAPDEVGTGPGVGFNVNMAFTGGLDPPMGDAEYLAAFRTVVMPI | |
| | | | | ASEFAPDVVLVSSGFDAVEGHPTPLGGYNLSARCFGYLTKQLMGL | |
| | | | | AGGRIVLALEGGHDLTAICDASEACVSALLGNELDPLPEKVLQQRP | |
| | | | | NANAVRSMEKVMEIHSKYWRCLQRTTSTAGRSLIEAQTCENEEAE | |
| | | | | TVTAMASLSVGVKPAEKRPDEEPMEEEPPL* | |
| HDAC4 | histone deacetylase 4 | 9759 | 123 | MPSTVDVATALPLQVAPSAVPMDLRLDHQFSLPVAEPALREQQLQ | 400. |
| | [Source:HGNC | | | QELLALKQKQQIQRQILIAEFQRQHEQLSRQHEAQLHEHIKQQQEM | |
| | Symbol; Acc:HGNC: | | | LAMKHQQELLEHQRKLERHRQEQELEKQHREQ | |
| | 14063] | | | | |
| HDAC4 | histone deacetylase 4 | 9759 | 162 | MDVATALPLQVAPSAVPMDLRLDHQFSLPVAEPALREQQLQQELL | 401. |
| | [Source:HGNC | | | ALKQKQQIQRQILIAEFQRQHEQLSRQHEAQLHEHIKQQQEMLAMK | |
| | Symbol; Acc:HGNC: | | | HQQELLEHQRKLERHRQEQELEKQHREQKLQQLKNKEKGKESAV | |
| | 14063] | | | ASTEVKMKLQEFVLNKKKALAHRNLNH | |
| HDAC4 | histone deacetylase 4 | 9759 | 176 | XAWPCVSTPQPPVFLRCHETRFWAVLAAVLPRSHCSLPFPVAGFGY | 402. |
| | [Source:HGNC | | | LTKQLMGLAGGRIVLALEGGHDLTAICDASEACVSALLGNELDPLP | |
| | Symbol; Acc:HGNC: | | | EKVLQQRPNANAVRSMEKVMEIHSKYWRCLQRTTSTAGRSLIEAQ | |
| | 14063] | | | TCENEEAETVTAMASLSVGVKPAEKRPDEEPMEEEPPL* | |
| HDAC4 | histone deacetylase 4 | 9759 | 148 | XWLYLFPHPPHPPHCGSGLYLQSHHLQQAWIPHSACSSAPGSGPSSP | 403. |
| | [Source:HGNC | | | NNSSGSVSAENGIAPAVPSIPAETSLAHRLVAREGSAAPLPLYTSPSL | |
| | Symbol; Acc:HGNC: | | | PNITLGLPATGPSAGTAGQQDAERLTLPALQQRLSLFPGTHLTPYLS | |
| | 14063] | | | TSPLER | |
| HDAC4 | histone deacetylase 4 | 9759 | 1090 | MSSQSHPDGLSGRDQPVELLNPARVNHMPSTVDVATALPLQVAPS | 404. |
| | [Source:HGNC | | | AVPMDLRLDHQFSLPVAEPALREQQLQQELLALKQKQQIQRQILIA | |
| | Symbol; Acc:HGNC: | | | EFQRQHEQLSRQHEAQLHEHIKQQQEMLAMKHQQELLEHQRKLER | |
| | 14063] | | | HRQEQELEKQHREQKLQQLKNKEKGKESAVASTEVKMKLQEFVL | |
| | | | | NKKKALAHRNLNHCISSDPRYWYGKTQHSSLDQSSPPQSGVSTSYN | |
| | | | | HPVLGMYDAKDDFPLRKTASEPNLKLRSRLKQKVAERRSSPLLRRK | |
| | | | | DGPVVTALKKRPLDVTDSACSSAPGSGPSSPNNSSGSVSAENGIAPA | |
| | | | | VPSIPAETSLAHRLVAREGSAAPLPLYTSPSLPNITLGLPATGPSAGT | |
| | | | | AGQQDAERLTLPALQQRLSLFPGTHLTPYLSTSPLERDGGAAHSPLL | |
| | | | | QHMVLLEQPPAQAPLVTDWYLSGLGALPLHAQSLVGADRVSPSIH | |
| | | | | KLRQHRPLGRTQSAPLPQNAQALQHLVIQQQHQQFLEKHKQQFQQ | |
| | | | | QQLQMNKIIPKPSEPARQPESHPEETEEELREHQALLDEPYLDRLPG | |
| | | | | QKEAHAQAGVQVKQEPIESDEEEAEPPREVEPGQRQPSEQELLFRQ | |
| | | | | QALLLEQQRIHQLRNYQASMEAAGIPVSFGGHRPLSRAQSSPASATF | |
| | | | | PVSVQEPPTKPRFTTGLVYDTLMLKHQCTCGSSSSHPEHAGRIQSIW | |
| | | | | SRLQETGLRGKCECIRGRKATLEELQTVHSEAHTLLYGTNPLNRQK | |
| | | | | LDSKKLLGSLASVFVRLPCGGVGVDSDTIWNEVHSAGAARLAVGC | |
| | | | | VVELVFKVATGELKNGFAVVRPPGHHAEESTPMGFCYFNSVAVAA | |
| | | | | KLLQQRLSVSKILIVDWDVHHGNGTQQAFYSDPSVLYMSLHRYDD | |
| | | | | GNFFPGSGAPDEVGTGPGVGFNVNMAFTGGLDPPMGDAEYLAAFR | |
| | | | | TVVMPIASEFAPDVVLVSSGFDAVEGHPTPLGGYNLSARCFGYLTK | |
| | | | | QLMGLAGGRIVLALEGGHDLTAICDASEACVSALLGNELDPLPEKV | |
| | | | | LQQRPNANAVRSMEKVMEIHSKYWRCLQRTTSTAGRSLIEAQTCE | |
| | | | | NEEAETVTAMASLSVGVKPAEKRPDEEPMEEEPPL* | |
| SLC25A19 | solute carrier family 25 | 60386 | 321 | MVGYDPKPDGRNNTKFQVAVAGSVSGLVTRALISPFDVIKIRFQLQ | 405. |
| | member 19 | | | HERLSRSDPSAKYHGILQASRQILQEEGPTAFWKGHVPAQILSIGYG | |
| | [Source:HGNC | | | AVQFLSFEMLTELVHRGSVYDAREFSVHFVCGGLAACMATLTVHP | |
| | Symbol; Acc:HGNC: | | | VDVLRTRFAAQGEPKVYNTLRHAVGTMYRSEGPQVFYKGLAPTLI | |
| | 14409] | | | AIFPYAGLQFSCYSSLKHLYKWAIPAEGKKNENLQNLLCGSGAGVI | |
| | | | | SKTLTYPLDLFKKRLQVGGFEHARAAFGQVRRYKGLMDCAKQVL | |
| | | | | QKEGALGFFKGLSPSLLKAALSTGFMFFSYEFFCNVFHCMNRTASQ | |
| | | | | R* | |
| SLC25A19 | solute carrier family 25 | 60386 | 264 | MVGYDPKPDGRNNTKFQVAVAGSVSGLVTRALISPFDVIKIRFQLQ | 406. |
| | member 19 | | | HERLSRSDPSAKYHGILQASRQILQEEGPTAFWKGHVPAQILSIGYG | |
| | [Source:HGNC | | | AVQVYNTLRHAVGTMYRSEGPQVFYKGLAPTLIAIFPYAGLQFSCY | |
| | Symbol; Acc:HGNC: | | | SSLKHLYKWAIPAEGKKNENLQNLLCGSGAGVISKTLTYPLDLFKK | |
| | 14409] | | | RLQVGGFEHARAAFGQVRRYKGLMDCAKQVLQKEGALGFFKGLS | |
| | | | | PSLLKAALSTGFMFFSYEFFCNVFHCMNRTASQR* | |
| SLC25A19 | solute carrier family 25 | 60386 | 153 | MVGYDPKPDGRNNTKFQVAVAGSVSGLVTRALISPFDVIKIRFQLQ | 407. |
| | member 19 | | | HERLSRSDPSAKYHGILQASRQILQEEGPTAFWKGHVPAQILSIGYG | |
| | [Source:HGNC | | | AVQFLSFEMLTELVHRGSVYDAREFSVHFVCGGLAACMATLTVHP | |
| | Symbol; Acc:HGNC: | | | VDVLRTRFAAQGEPK | |
| | 14409] | | | | |
| SLC25A19 | solute carrier family 25 | 60386 | 106 | MVGYDPKPDGRNNTKFQVAVAGSVSGLVTRALISPFDVIKIRFQLQ | 408. |
| | member 19 | | | HERLSRSDPSAKYHGILQASRQILQEEGPTAFWKGHVPAQILSIGYG | |
| | [Source:HGNC | | | AVQFLSFEMLTEL | |
| | Symbol; Acc:HGNC: | | | | |
| | 14409] | | | | |
| SLC25A19 | solute carrier family 25 | 60386 | 68 | XKFQVAVAGSVSGLVTRALISPFDVIKIRFQLQHERLSRSDPSAKYH | 409. |
| | member 19 | | | GILQGSPHERIRGNAGRGLW* | |
| | [Source:HGNC | | | | |
| | Symbol; Acc:HGNC: | | | | |
| | 14409] | | | | |
| SLC25A19 | solute carrier family 25 | 60386 | 85 | MVGYDPKPDGRNNTKFQVAVAGSVSGLVTRALISPFDVIKIRFQLQ | 410. |
| | member 19 | | | HERLSRSDPSAKYHGILQASRQILQEEGPTAFWKGHVPA | |
| | [Source:HGNC | | | | |
| | Symbol; Acc:HGNC: | | | | |
| | 14409] | | | | |
| SLC25A19 | solute carrier family 25 | 60386 | 84 | MLTELVHRGSVYDAREFSVHFVCGGLAACMATLTVHPVDVLRTRF | 411. |
| | member 19 | | | AAQGEPKVYNTLRHAVGTMYRSEGPQVFYKGLAPTLIAI | |
| | [Source:HGNC | | | | |
| | Symbol; Acc:HGNC: | | | | |
| | 14409] | | | | |
| SLC25A19 | solute carrier family 25 | 60386 | 39 | MVGYDPKPDGRNNTKFQVAVAGSVSGLVTRALISPFDVI | 412. |
| | member 19 | | | | |
| | [Source:HGNC | | | | |
| | Symbol; Acc:HGNC: | | | | |
| | 14409] | | | | |
| SLC25A19 | solute carrier family 25 | 60386 | 182 | MVGYDPKPDGRNNTKFQVAVAGSVSGLVTRALISPFDVIKIRFQLQ | 413. |
| | member 19 | | | HERLSRSDPSAKYHGILQASRQILQEEGPTAFWKGHVPAQILSIGYG | |
| | [Source:HGNC | | | AVQFLSFEMLTELVHRGSVYDAREFSVHFVCGGLAACMATLTVHP | |
| | Symbol; Acc:HGNC: | | | VDVLRTRFAAQGEPKVRRYKGLMDCAKQVLQKEGALGFFKGLSP | |
| | 14409] | | | | |
| SLC25A19 | solute carrier family 25 | 60386 | 151 | MVGYDPKPDGRNNTKFQVAVAGSVSGLVTRALISPFDVIKIRFQLQ | 414. |
| | member 19 | | | HERLSRSDPSAKYHGILQASRQILQEEGPTAFWKGHVPAQILSIGYG | |
| | [Source:HGNC | | | AVQFLSFEMLTELVHRGSVYDAREFSVHFVCGGLAACMATLTVHP | |
| | Symbol; Acc:HGNC: | | | VDVLRTRFAAQGE | |
| | 14409] | | | | |

[0047] In some embodiments of the methods described herein, increasing expression and/or activity of a cellular factor set forth in Table 1 may comprise increasing expression of the cellular factor or increasing expression of a polynucleotide, for example, an mRNA, encoding the cellular factor in the target cell. In some embodiments of the methods described herein, decreasing expression and/or activity of a cellular factor set forth in Table 1 may comprise decreasing expression of the cellular factor or decreasing expression of a polynucleotide, for example, an mRNA, encoding the cellular factor in the target cell. In some embodiments, expression and/or activity of one or more cellular factors set forth in Table 1 is increased in the target cell. In some embodiments, expression and/or activity of one or more cellular factors set forth in Table 1 is decreased in the target cell. As described in detail further herein, one or more available methods may be used to increase or decrease the expression and/or activity of one or more cellular factors set forth in Table 1.

[0048] In some embodiments of the methods described herein, increasing or decreasing expression and/or activity of the one or more cellular factors in Table 1 comprises contacting the target cell with an agent selected from the group consisting of an antibody, a small molecule, a polypeptide, siRNA, microRNA or a drug.

[0049] In some embodiments activity of one one or more cellular factors in Table 1 is increased or decreased by contacting the target cell with an antibody. Examples of antibodies that can be used to increase or decrease activity of one one or more cellular factors in Table 1 or Table 2 are set forth in Table 3.

TABLE 3

| | | Antibody | |
|---|---|---|---|
| Antibody Target | Clone | Function | Source |
| anti-BTN3A | 20.1 | Activating | ThermoFisher |
| (CD277) | | | Scientific |
| anti-BTN3A | 103.2 | Blocking | Creative Biolabs |
| (CD277) | | | |
| anti-BTN3A | 849203 | | R&D Systems |
| (CD277) | | | |
| anti-BTN2A | 4.15 | Blocking | WO 2019/057933 Al |
| anti-BTN2A | 5.28 | Blocking | WO 2019/057933 Al |
| anti-BTN2A | 7.28 | Blocking | WO 2019/057933 Al |
| anti-BTN2A | 7.48 | Blocking | WO 2019/057933 Al |
| anti-BTN2A | 8.15 | Blocking | WO 2019/057933 Al |
| anti-BTN2A | 3A1 | | Sigma Aldrich |
| anti-BTN2A | 8.16 | Blocking | WO 2019/057933 Al |
| anti-ICAMI | HCD54 | Blocking | BioLegend |
| anti-ICAMI | YN1/1.7.4 | Blocking | StemCell, Abcam |

[0050] In some embodiments, the antibody is a bispecific antibody, wherein the bispecific antibody has specificity for an epitope of the one or more cellular factors of Table 1 expressed by the target cell and specificity for an epitope on the γδ T cell. In some embodiments, the bispecific antibody brings the target cell and the γδ T cell into proximity to increase cytotoxicity of the γδ T cell against the target cell.

[0051] In some embodiments, overexpressing a cellular factor set forth in Table 1 may comprise introducing a polynucleotide encoding the cellular factor into the target cell. In other embodiments of the methods described herein, overexpressing a cellular factor set forth in Table 1 may comprise introducing an agent that induces expression of the endogenous gene encoding the cellular factor in the target cell. For example, RNA activation, where short double-stranded RNAs induce endogenous gene expression by targeting promoter sequences, can be used to induce endogenous gene expression (See, for example, Wang et al. “Inducing gene expression by targeting promoter sequences using small activating RNAs,” J. Biol. Methods 2(1): e14 (2015)). In another example, artificial transcription factors containing zinc-finger binding domains can be used to activate or repress expression of endogenous genes. See, for example, Dent et al., “Regulation of endogenous gene expressing using small molecule-controlled engineered zinc-finger protein transcription factors,” Gene Ther. 14(18): 1362-9 (2007).

[0052] In some embodiments, inhibiting expression may comprise contacting a polynucleotide encoding the cellular factor, with a target nuclease, a guide RNA (gRNA), an siRNA, an antisense RNA, microRNA (miRNA), or short hairpin RNA (shRNA).

[0053] An siRNA, an antisense RNA, a miRNA, or a shRNA may target a sequence comprising at least 10, at least 20, at least 30, at least 40, at least 50, at least 60, at least 70, at least 80, at least 90, or at least 100 contiguous nucleotides. An siRNA may be produced from a short hairpin RNA (shRNA). A shRNA is an artificial RNA molecule with a hairpin turn that can be used to silence target gene expression via the siRNA it produces in cells. See, e.g., Fire et. al., Nature 391:806-811, 1998; Elbashir et al., Nature 411:494-498, 2001; Chakraborty et al., Mol Ther Nucleic Acids 8:132-143, 2017; and Bouard et al., Br. J. Pharmacol. 157:153-165, 2009. Expression of shRNA in cells is typically accomplished by delivery of plasmids or through viral or bacterial vectors. Suitable bacterial vectors include but not limited to adeno-associated viruses (AAVs), adenoviruses, and lentiviruses. After the vector has integrated into the host genome, the shRNA is then transcribed in the nucleus by polymerase II or polymerase III (depending on the promoter used). The resulting pre-shRNA is exported from the nucleus, then processed by a protein called Dicer and loaded into the RNA-induced silencing complex (RISC). The sense strand is degraded by RISC and the antisense strand directs RISC to an mRNA that has a complementary sequence. A protein called Ago2 in the RISC then cleaves the mRNA, or in some cases, represses translation of the mRNA, leading to its destruction and an eventual reduction in the protein encoded by the mRNA. Thus, the shRNA leads to targeted gene silencing.

[0054] The shRNA or siRNA may be encoded in a vector. In some embodiments, the vector further comprises appropriate expression control elements known in the art, including, e.g., promoters (e.g., inducible promoters or tissue specific promoters), enhancers, and transcription terminators.

[0055] In some embodiments, increasing or decreasing expression and/or activity of one or more cellular factors set forth in Table 1 comprises inhibiting or activating one or more cellular factors in the mevalonate pathway, pyrophosphate metabolism pathway or cholesterol pathway of the target cell. Examples of agents that can be used to inhibit or activate one or more cellular factors in the mevalonate pathway, pyrophosphate metabolism pathway or cholesterol pathway of the target cell include, but are not limited to, the agents set forth in Table 4.

TABLE 4

| Target | Inhibitor |
|---|---|
| Farnesyltransferase | Tipifarnib |
| Farnesyltransferase | Lonafarnib |
| Farnesyltransferase | L-744,832 |
| Farnesyltransferase | BMS-214662 hydrochloride |
| Squalene synthase | Zaragozic acid A trisodium |
| | salt |
| Mevalonate-pyrophosphate | 6-Fluoromevalonate |
| decarboxylase | |
| Geranylgeranyltransferase I | GGTI 298 trifluoroacetate |
| (GGTase I) | salt hydrate |
| Squalene synthase | YM-53601 |
| Farnesyltransferase | FTI-277 trifluoroacetate salt |
| 7-dehydro cholesterol Δ7- | AY 9944 |
| reductase (DHCR7) enzyme | |
| Farnesyl diphosphate synthase | Pamidronate |
| Farnesyl diphosphate synthase | Neridronate |
| Farnesyl diphosphate synthase | Olpadronate |
| Farnesyl diphosphate synthase | Alendronate |
| Farnesyl diphosphate synthase | Ibandronate |
| Farnesyl diphosphate synthase | Risedronate |
| Farnesyl diphosphate synthase | Zoledronate |
| HMGCR | Atorvastatin |
| HMGCR | Cerivastatin |
| HMGCR | Fluvastatin |
| HMGCR | Lovastatin |
| HMGCR | Mevastatin |
| HMGCR | Pitavastatin |
| HMGCR | Pravastatin |
| HMGCR | Rosuvastatin |
| HMGCR | Simvastatin |

[0056] In some embodiments, the target cell is a cancer cell, a cell infected with an infectious agent or pathogen, a non-cancerous cell expressing one or more antigens recognized by γδ T cells (for example, one or more cellular factors set forth in Table 1), an osteoclast or an osteoblast, to name a few. Any of the methods provided herein can be performed in vitro, ex vivo or in vivo.

[0057] Also provided is a modified γδ T cell comprising a cell-surface ligand that binds to a cellular factor set forth in Table 1. In some embodiments, the cell-surface ligand inhibits activity of a cellular factor set forth in Table 1. In some embodiments, the cell-surface ligand stimulates or increases activity of a cellular factor set forth in Table 1. In some embodiments, the modified γδ T cell comprises a heterologous polynucleotide that encodes a cell-surface protein that binds to a cellular factor set forth in Table 1. In some embodiments, the cell-surface protein an antibody or a fragment thereof that is expressed on the cell surface of the γδ T cell and binds to a cellular factor set forth in Table 1. In some embodiments, the cell surface ligand or protein is a cognate ligand that binds to a cellular factor set forth in Table 1. Populations of the modified cells described herein are also provided.

[0058] Methods for modifying cells, for example, target cells or γδ T cells are known in the art. For example, viral vectors such as a gammaretroviral vector can be used to transduce γδ T cells with a polynucleotide encoding a polypeptide, for example, a cell-surface ligand, that binds to a cellular factor set forth in Table 1. Non-viral methods, for example, transposon-based gene transfer can also be used. See, for example, Fisher and Anderson, “Engineering Approaches in Human Gamma Delta T Cells for Cancer immunotherapy,” Front. Immunol. June 2018. Methods employing targeted nucleases for insertion of a polynucleotide can also be used. In some embodiments, the targeted nuclease is selected from the group consisting of an RNA-guided nuclease domain, a transcription activator-like effector nuclease (TALEN), a zinc finger nuclease (ZFN) and a megaTAL (See, for example, Merkert and Martin “Site-Specific Genome Engineering in Human Pluripotent Stem Cells,” Int. J. Mol. Sci. 18(7): 1000 (2016)). In some embodiments, the RNA-guided nuclease is a Cas9 nuclease and the method further comprises introducing into the cell a guide RNA that specifically hybridizes to a target region in the genome of γδ T cell.

[0059] As used throughout, a guide RNA (gRNA) sequence is a sequence that interacts with a site-specific or targeted nuclease and specifically binds to or hybridizes to a target nucleic acid within the genome of a cell, such that the gRNA and the targeted nuclease co-localize to the target nucleic acid in the genome of the cell. Each gRNA includes a DNA targeting sequence or protospacer sequence of about 10 to 50 nucleotides in length that specifically binds to or hybridizes to a target DNA sequence in the genome. For example, the DNA targeting sequence is about 10, 11, 12, 13, 14, 15, 16, 17, 18, 19, 20, 21, 22, 23, 24, 25, 26, 27, 28, 29, 30, 31, 32, 33, 34, 35, 36, 37, 38, 39, 40, 41, 42, 43, 44, 45, 46, 47, 48, 49, or 50 nucleotides in length. In some embodiments, the gRNA comprises a crRNA sequence and a transactivating crRNA (tracrRNA) sequence. In some embodiments, the gRNA does not comprise a tracrRNA sequence.

[0060] Generally, the DNA targeting sequence is designed to complement (e.g., perfectly complement) or substantially complement the target DNA sequence. In some cases, the DNA targeting sequence can incorporate wobble or degenerate bases to bind multiple genetic elements. In some cases, the 19 nucleotides at the 3′ or 5′ end of the binding region are perfectly complementary to the target genetic element or elements. In some cases, the binding region can be altered to increase stability. For example, non-natural nucleotides, can be incorporated to increase RNA resistance to degradation. In some cases, the binding region can be altered or designed to avoid or reduce secondary structure formation in the binding region. In some cases, the binding region can be designed to optimize G-C content. In some cases, G-C content is preferably between about 40% and about 60% (e.g., 40%, 45%, 50%, 55%, 60%).

[0061] In some embodiments, the Cas9 nuclease, the guide RNA and the nucleic acid sequence encoding a heterologous polypeptide are introduced into the cell as a ribonucleoprotein complex (RNP)-DNA template complex, wherein the RNP-DNA template complex comprises: (i) the RNP, wherein the RNP comprises the Cas9 nuclease and the guide RNA; and (ii) the DNA template encoding a heterologous polypeptide. In some embodiments, the RNP complex may be introduced into about 1×10⁵ to about 2×10⁶ cells (e.g., 1×10⁵ cells to about 5×10⁵ cells, about 1×10⁵ cells to about 1×10⁶ cells, 1×10⁵ cells to about 1.5×10⁶ cells, 1×10⁵ cells to about 2×10⁶ cells, about 1×10⁶ cells to about 1.5×10⁶ cells, or about 1×10⁶ cells to about 2×10⁶ cells). In some embodiments, the δ T cells are cultured under conditions effective for expanding the population of modified γδ T cells. Also disclosed herein is a population of γδ T cells, in which the genome of at least 20%, 30%, 40%, 50%, 60%, 70%, 80%, 90%, 95%, 99% or greater of the cells comprises a heterologous polynucleotide encoding a cell-surface protein that binds to one or more cellular factors set forth in Table 1.

[0062] III. Methods of Treatment

[0063] Any of the methods described herein for increasing or decreasing sensitivity of target cells to killing by γδ T cells may be performed in a human subject. Any of the methods and compositions described herein may be used to increase or decrease sensitivity of a target cell to killing by γδ T cells, wherein the target cells are obtained from a human subject. Any of the methods provided herein may be used to treat or prevent a disease (e.g., cancer, an autoimmune disease, an infectious disease, a metabolic disorder or a bone disorder).

[0064] Provided herein is a method of increasing sensitivity of target cells to killing by a γδ T cell in a subject in need thereof, comprising increasing expression and/or activity of one or more cellular factors set forth in Table 1, in the target cells of the subject. In some embodiments, the subject has cancer or an infectious disease.

[0065] Examples of cancers include, but are not limited to, Chondrosarcoma, Ewing's sarcoma, Malignant fibrous histiocytoma of bone/osteosarcoma, Osteosarcoma, Rhabdomyosarcoma, Heart cancer, Astrocytoma, Brainstem glioma, Pilocytic astrocytoma, Ependymoma, Primitive neuroectodermal tumor, Cerebellar astrocytoma, Cerebral astrocytoma, Glioma, Medulloblastoma, Neuroblastoma, Oligodendroglioma, Pineal astrocytoma, Pituitary adenoma, Visual pathway and hypothalamic glioma, Breast cancer, Invasive lobular carcinoma, Tubular carcinoma, Invasive cribriform carcinoma, Medullary carcinoma, Male breast cancer, Phyllodes tumor, Inflammatory Breast Cancer, Adrenocortical carcinoma, Islet cell carcinoma, Multiple endocrine neoplasia syndrome, Parathyroid cancer, Pheochromocytoma, Thyroid cancer, Merkel cell carcinoma, Uveal melanoma, Retinoblastoma, Anal cancer, Appendix cancer, cholangiocarcinoma, Carcinoid tumor (gastrointestinal), Colon cancer, Extrahepatic bile duct cancer, Gallbladder cancer, Gastric (stomach) cancer, Gastrointestinal carcinoid tumor, Gastrointestinal stromal tumor (GIST), Hepatocellular cancer, Pancreatic cancer (islet cell), Rectal cancer, Bladder cancer, Cervical cancer, Endometrial cancer, Extragonadal germ cell tumor, Ovarian cancer, Ovarian epithelial cancer (surface epithelial-stromal tumor), Ovarian germ cell tumor, Penile cancer, Renal cell carcinoma, Renal pelvis and ureter (transitional cell cancer), Prostate cancer, Testicular cancer, Gestational trophoblastic tumor, Ureter and renal pelvis (transitional cell cancer), Urethral cancer, Uterine sarcoma, Vaginal cancer, Vulvar cancer, Wilms tumor, Esophageal cancer, Head and neck cancer, Nasopharyngeal carcinoma, Oral cancer, Oropharyngeal cancer, Paranasal sinus and nasal cavity cancer, Pharyngeal cancer, Salivary gland cancer, Hypopharyngeal cancer, Acute biphenotypic leukemia, Acute eosinophilic leukemia, Acute lymphoblastic leukemia, Acute myeloid leukemia, Acute myeloid dendritic cell leukemia, AIDS-related lymphoma, Anaplastic large cell lymphoma, Angioimmunoblastic T-cell lymphoma, B-cell prolymphocytic leukemia, Burkitt's lymphoma, Chronic lymphocytic leukemia, Chronic myelogenous leukemia, Cutaneous T-cell lymphoma, Diffuse large B-cell lymphoma, Follicular lymphoma, Hairy cell leukemia, Hepatosplenic T-cell lymphoma, Hodgkin's lymphoma, Intravascular large B-cell lymphoma, Large granular lymphocytic leukemia, Lymphoplasmacytic lymphoma, Lymphomatoid granulomatosis, Mantle cell lymphoma, Marginal zone B-cell lymphoma, Mast cell leukemia, Mediastinal large B cell lymphoma, Multiple myeloma/plasma cell neoplasm, Myelodysplastic syndromes, Mucosa-associated lymphoid tissue lymphoma, Mycosis fungoides, Nodal marginal zone B cell lymphoma, Non-Hodgkin lymphoma, Precursor B lymphoblastic leukemia, Primary central nervous system lymphoma, Primary cutaneous follicular lymphoma, Primary cutaneous immunocytoma, Primary effusion lymphoma, Plasmablastic lymphoma, Sézary syndrome, Splenic marginal zone lymphoma, T-cell prolymphocytic leukemia, Basal cell carcinoma, Squamous cell carcinoma, Skin adnexal tumors (e.g. sebaceous carcinoma), Melanoma, Merkel cell carcinoma, Sarcomas of primary cutaneous origin (e.g. dermatofibrosarcoma protuberans), Lymphomas of primary cutaneous origin (e.g. mycosis fungoides), Bronchial adenomas/carcinoids, Small cell lung cancer, Mesothelioma, Non-small cell lung cancer, Pleuropulmonary blastoma, Laryngeal cancer, Thymoma and thymic carcinoma, Kaposi sarcoma, Epithelioid hemangioendothelioma (EHE), Desmoplastic small round cell tumor and Liposarcoma.

[0066] Examples of infectious diseases include bacterial infections, viral infections and parasitic infections such as, for example, malaria (Plasmodium spp.), tuberculosis, listeriosis and cytomegalovirus infection.

[0067] Also provided herein is a method of decreasing sensitivity of target cells to killing by a γδ T cell in a subject in need thereof, comprising decreasing expression and/or activity of one or more cellular factors set forth in Table 1, in the target cells of the subject. In some embodiments, the subject has a bone disorder, a metabolic disorder or an autoimmune disorder.

[0068] Examples of bone disorders include, but are not limited to, osteoporosis, Paget's disease of bone, fibrous dysplasia of bone, osteogenesis imperfecta and primary by hyperparathyroidism.

[0069] Examples of metabolic disorders include, but are not limited to, abnormal cholesterol levels, Gaucher's disease, Fabry disease, Sitosterolemia, Lysosomal acid lipase deficiency and Cerebrotendineous xanthomatosis.

[0070] Examples of autoimmune disorders that can be treated or prevented include, but are not limited to, rheumatoid arthritis, Type 1 diabetes, multiple sclerosis, Crohn's disease, systemic lupus erythematosus, scleroderma, Sjogren's syndrome, Addison's disease, ankylosing spondylitis, aplastic anemia, autoimmune hemolytic anemia, autoimmune hepatitis, coeliac disease, dermatomyositis, Goodpasture's syndrome, Graves' disease, Guillain-Barre syndrome. Hashimoto's disease, idiopathic leucopenia, idiopathic thrombocytopenic purpura, male infertility, mixed connective tissue disease, myasthenia gravis, pernicious anemia, phacogenic uveitis, primary biliary cirrhosis, primary myxoedema and Reiter's syndrome.

[0071] Any of the methods of treatment described herein can further comprise administering γδ T cells to the subject. In some embodiments, the γδ T cells are autologous γδ T cells or allogeneic γδ T cells. In some embodiments, the γδ T cells are Vγ9Vδ2 T cell. In some embodiments, the γδ T cells comprise a heterologous cell-surface ligand that binds to a cellular factor set forth in Table 1. In some embodiments, the γδ T cells comprise a heterologous polynucleotide that encodes a cell-surface protein that binds to a cellular factor set forth in Table 1. In some embodiments, the cell-surface ligand is a heterologous antibody expressed by the γδ T cells.

[0072] Disclosed are materials, compositions, and components that can be used for, can be used in conjunction with, can be used in preparation for, or are products of the disclosed methods and compositions. These and other materials are disclosed herein, and it is understood that when combinations, subsets, interactions, groups, etc. of these materials are disclosed that while specific reference of each various individual and collective combinations and permutations of these compounds may not be explicitly disclosed, each is specifically contemplated and described herein. For example, if a method is disclosed and discussed and a number of modifications that can be made to one or more molecules including in the method are discussed, each and every combination and permutation of the method, and the modifications that are possible are specifically contemplated unless specifically indicated to the contrary. Likewise, any subset or combination of these is also specifically contemplated and disclosed. This concept applies to all aspects of this disclosure including, but not limited to, steps in methods using the disclosed compositions. Thus, if there are a variety of additional steps that can be performed, it is understood that each of these additional steps can be performed with any specific method steps or combination of method steps of the disclosed methods, and that each such combination or subset of combinations is specifically contemplated and should be considered disclosed.

[0073] Publications cited herein and the material for which they are cited are hereby specifically incorporated by reference in their entireties.

### Examples

[0074] The following examples are provided by way of illustration only and not by way of limitation. Those of skill in the art will readily recognize a variety of non-critical parameters that could be changed or modified to yield essentially the same or similar results.

### Virus Production

[0075] The Human Improved Genome-wide Knockout CRISPR Library (Deposited by Kosuke Yusa, Pooled Library #67989, Addgene) was used for these studies. The library targeted 18,010 genes in the human genome with 90,709 guide RNAs (gRNAs). Twelve million HEK293T cells were plated in 15-cm poly-L-Lysine coated dishes 16 hours before transfection and cultured in complete DMEM (5% FBS, 1% pen/strep). Cells were transfected with the gRNA Yusa Library transfer plasmids and 2nd generation lentiviral packaging plasmids, pMD2.G (Addgene, Cat #12259) and psPAX2 (Addgene, Cat #12260) using FugeneHD (Promega) following the manufacturer's protocol. The following day, media was supplemented with ViralBoost Reagent (Alstem). The viral supernatant was collected 48 hours after transfection and spun down at 300×g for 10 minutes, to remove cell debris. To concentrate the lentiviral particles, Lentivirus Precipitation Solution (Alstem) was added to the collected supernatant and refrigerated at 4 C overnight. Then, the virus was concentrated by centrifugation at 1500×g for 30 minutes at 4 C. Finally, each lentiviral pellet was resuspended in 1/100th of the original volume in cold PBS and stored at −80° C.

### Daudi Genome-Wide Knockout

[0076] Daudi-Cas9 cells were cultured for at least two weeks in complete RPMI+Blasticidin (2 mM L-glutamine, 10% FCS, 1% Pen/Strep, 5 μg/mL blasticidin). For the genome-wide knockout, we grew 250E6 Daudi cells. The cells were brought to 3E6 cells/mL in cRPMI+Blasticidin and supplemented with 4 μg/mL polybrene and virus added at 1:400 dilution. The cell mixture was spun in 6-well plates at 2.5 mL per well, 300×g, 25° C., 2 hours. At the end of the spin, the cells were transferred into the 37° C. incubator. After resting for 6 hours, the cells were diluted to 300E3 cells/mL and placed at 37° C. Three days after the infection, the cells were split following the standard procedure of seeding the cells at 300E3 cells/mL. The infection frequency was confirmed to be 20-30%. The cells were supplemented with 5 μg/mL puromycin to select only for cells that were successfully infected with the virus. Four days after the puromycin treatment, the cells were checked for infection purity by assaying BFP expression on a flow cytometer. The cells were placed in fresh cRPMI media without puromycin or blasticidin. The cells were passaged every 2-3 days at 300E3 cells/mL, maintaining a large enough pool of cells (>150E6 cells) to have sufficient genome-wide gRNA library representation (>1000× coverage). Genomic DNA was prepared from 50E6 cells and amplified the virally integrated gRNA-encoding region. The amplified library was analyzed by Next Generation Sequencing (NGS) (HiSeq, Illumina) to confirm even distribution of gRNAs from the library in the CRISPR-edited pool of Daudi cells. The results showed good distribution of gRNAs and relative reduction in gRNAs targeted against essential genes. One day prior to the killing assay, the edited Daudi cells were treated with 50 uM zoledronic acid.

### Vγ9Vδ2 T Cell Expansion

[0077] Peripheral blood mononuclear cells (PBMCs) from four healthy donors were obtained from TRIMA residuals from apheresis collection. For each donor, an aliquot of PBMCs was analyzed by flow cytometry to assess baseline frequency of Vγ9Vδ2 T cells. Three of the donors had sufficiently high levels of Vγ9Vδ2 T cells (>1% of total live PBMCs). We proceeded with these three donors. The cells were diluted to 1E6 cells/mL in cRPMI supplemented with 5 uM zoledronic acid and 100 U/mL IL-2. The cells were given 100 U/mL of IL-2 every 2-3 days. The cells were cultured for 8 days.

### Vγ9Vδ2 T Cell-Daudi Killing Assay Screen

[0078] Eight days after starting the Vγ9Vδ2 T cell expansion, the cells were harvested. Using flow cytometry we confirmed that Vγ9Vδ2 T cells sufficiently expanded (>75% of total live cells). Using a custom γδ T cell negative isolation kit (StemCell Technologies), we isolated γδ T cells for all three donors. The Vγ9Vδ2 T cells were aliquoted into flasks. In parallel, Daudi cells were harvested and washed. For each T cell donor, Vγ9Vδ2 T cells and Daudi cells were mixed at effector:target (E:T) ratios of 1:2 and 1:4. The cells were cultured at 2E6 cells/mL in cRPMI supplemented with 5 uM zoledronic acid and 100 U/mL IL-2. At 24 hours after the start of the co-culture, we harvested Daudi cells by depleting the Vγ9Vδ2 T cells using a CD3 Positive Isolation Kit (StemCell Technologies). The Daudi cells were cultured until the dead cells were depleted from the culture. Using the resulting Daudi cell population, we obtained genomic DNA, amplified the integrated gRNA sequence through two rounds of PCR, and sequenced the libraries by NGS (HiSeq, Illumina).

### Data Analysis

[0079] Counts for gRNA libraries were generated using the count command in MAGeCK version 0.5.8 (mageck count --norm-method none). High outlier counts were filtered out before calculating differentially enriched gRNAs between the low and high bins using the mageck test command (mageck test -k countfile -t D6_1-2_S4_L001_R1_001.fastq.gz,D6_1-4_S4_L001_R1_001.fastq.gz,D8_1-4_S5_L001_R1_001.fastq.gz,D9_1-2_S2_L001_R1_001.fastq.gz,D9_1-4_S3_L001_R1_001.fastq.gz -c Pre-Kill_Daudi-Cas9-Yusa_S1_L001_R1_001.fastq.gz --sort-criteria pos -n). We used an FDR<0.10 as a cutoff to call significantly differentially enriched sgRNAs.

### Results

[0080] FIG. 1 provides aggregate data of gRNA enrichment among Daudi cells that survived the co-culture with expanded Vγ9Vδ2 T cells from three different healthy donors. The labeled data points above the dashed lines are positively enriched genes with a false-discovery rate (FDR) of less than 0.1. Their biological function is set forth in Table 5.

[0081] Table 5 provides functional groupings of some of the significantly enriched (FDR<0.1) gene knockouts (as shown in FIG. 1) across co-culture-based screens performed with expanded Vγ9Vδ2 T cells from three different healthy donors and target Daudi cells. Surviving Daudi cells were analyzed for integrated gRNAs within their genomic DNA. Some of the genes are placed in more than one grouping.

TABLE 5
Functional groupings of significantly enriched genes.

Metabolism/Nutrient
Sensing
NPRL2
MPC2
SIRT1
GLA
ACSL3
SGMS1
CARKD (NAXD)
Transcription
Factors
SPIB
IRF1
SPI1
IRF9
STAT2
STAT1
IRF8
CREBBP
ZBTB7A
MGA
ZHX2
FOXP1
AFF3
RFXAP
NLRC5
FTSJ1
HDAC4
GFI1
CPSF7
ZC3H12A
Mevalonate/Cholesterol
Pathway
ACAT2
SQLE
MYLIP
RCE1
HMGCR
Butyrophilins
BTN3A1
BTN2A1
BTN3A2
Kinase/Phosphatase
CSNK2A1
PRKD3
PRKCE
MTMR8
CDK5
Lysosomal
targeting/Intracellular
trafficking
HPS3
LRBA
Expression Regulation
FBXW7
MTA2
G2E3
GSPT2
Tumor Suppressors/
Cell cycling
TSPYL2
GGNBP2
GLTSCR1 (BICRA)
PDS5B
Channels/Transporters
LRRC8A
LRRC8C
SLC25A19
KCNG2
SLC37A3
Surface Receptors (for
example, immune
receptors) (non-BTN)
IFNAR1
ICAM1
THY1
S1PR2
XK
Misc./Unknown
XPNPEP1
ADAM22
SULT1A2
EFHC2
MOSPD1
ZNF699
DDIT4
ZNF687
PNKD
FAM122A
AMMECR1

1. A method of increasing sensitivity of a target cell to killing by a γδ T cell, comprising:
increasing expression and/or activity of one or more cellular factors set forth in Table 1, in the target cell.

2. The method of claim 1, wherein the sensitivity of the target cell is increased in the presence of the γδ T cell.

3. The method of claim 1, wherein the target cell is a cancer cell.

4. The method of claim 3, wherein the target cell is a cell that is infected with an infectious agent.

5. The method of claim 1, wherein increasing expression and/or activity of the one or more cellular factors in Table 1 comprises contacting the target cell with an agent selected from the group consisting of an antibody, a small molecule, a polypeptide, siRNA, microRNA or a drug.

6. The method of claim 1, wherein increasing expression comprises increasing expression of the cellular factor of Table 1, or increasing expression of a polynucleotide encoding the cellular factor of Table 1.

7. A method of decreasing sensitivity of a target cell to killing by a γδ T cell, comprising:
inhibiting expression and/or activity of one or more cellular factors set forth in Table 1, in the target cell.

8. The method of claim 7, wherein the sensitivity of the target cell is decreased in the presence of the γδ T cell.

9. The method of claim 7, wherein decreasing expression and/or activity of the one or more cellular factors in Table 1 comprises contacting the target cell with an agent is selected from the group consisting of an antibody, a small molecule, a polypeptide, siRNA, microRNA, or a drug.

10. The method of claim 7, wherein decreasing expression comprises reducing expression of the cellular factor, or reducing expression of a polynucleotide encoding the cellular factor.

11. The method of claim 5, wherein the antibody is a bispecific antibody, wherein the bispecific antibody has specificity for an epitope of the one or more cellular factors of Table 1 expressed by the target cell and specificity for an epitope on the γδ T cell.

12. The method of claim 1, wherein the target cell is ex vivo, in vitro or in vivo.

13. The method of claim 1, wherein the sensitivity of the target cell is increased or decreased in a human.

14. The method of claim 13, wherein the human has cancer, an autoimmune disorder or an infectious disease.

15. The method of claim 1, wherein the γδ T cell is a Vγ9Vδ2 T cell.

16. The method of claim 13, wherein the method further comprises administering γδ T cells to the human.

17. The method of claim 16, wherein the γδ T cells are autologous γδ T cells or allogeneic γδ T cells.

18. The method of claim 16, wherein the γδ T cells comprise a heterologous cell-surface protein that binds to a cellular factor set forth in Table 1.

19. The method of claim 1, wherein sensitivity of target cells to killing by a γδ T cell is increased in a subject in need thereof.

20. The method of claim 19, wherein the subject has cancer or an infectious disease.

21. The method of claim 7, wherein sensitivity of target cells to killing by a γδ T cell is decreased in a subject in need thereof.

22. The method of claim 21, wherein the subject has a bone disorder, a metabolic disorder or an autoimmune disease.

23. The method of claim 19, further comprising administering γδ T cells to the subject.

24. The method of claim 23, wherein the γδ T cells are Vγ9Vδ2 T cells.

25. The method of claim 23, wherein the γδ T cells are autologous γδ T cells or allogeneic γδ T cells.

26. The method of claim 23, wherein the γδ T cells comprise a heterologous cell-surface ligand that binds to a cellular factor set forth in Table 1.

27. A modified T cell comprising a heterologous polynucleotide that encodes a cell-surface protein that binds to a cellular factor set forth in Table 1.

28. The modified γδ T cell of claim 27, wherein the cell-surface protein is an antibody.

29. The modified γδ T cell of claim 27, wherein the γδ T cell is a Vγ9Vδ2 T cell.

The application's sequence listing, which the Patent Office published only in electronic form, follows.

SEQUENCE LISTING (414 sequences)

SEQ ID NO: 1 - protein, 697 aa, Homo sapiens
MARLVAVCRDGEEEFPFERRQIPLYIDDTLTMVMEFPDNVLNLDGHQNNGAQLKQFIQRHGMLKQQDLSIAMVVTSREVLSALSQLVPCVGCRRSVERLFSQLVESGNPALEPLTVGPKGVLSVTRSCMTDAKKLYTLFYVHGSKLNDMIDAIPKSKKNKRCQLHSLDTHKPKPLGGCWMDVWELMSQECRDEVVLIDSSCLLETLETYLRKHRFCTDCKNKVLRAYNILIGELDCSKEKGYCAALYEGLRCCPHERHIHVCCETDFIAHLLGRAEPEFAGGRRERHAKTIDIAQEEVLTCLGIHLYERLHRIWQKLRAEEQTWQMLFYLGVDALRKSFEMTVEKVQGISRLEQLCEEFSEEERVRELKQEKKRQKRKNRRKNKCVCDIPTPLQTADEKEVSQEKETDFIENSSCKACGSTEDGNTCVEVIVTNENTSCTCPSSGNLLGSPKIKKGLSPHCNGSDCGYSSSMEGSETGSREGSDVACTEGICNHDEHGDDSCVHHCEDKEDDGDSCVECWANSEENDTKGKNKKKKKKSKILKCDEHIQKLGSCITDPGNRETSGNTMHTVFHRDKTKDTHPESCCSSEKGGQPLPWFEHRKNVPQFAEPTETLFGPDSGKGAKSLVELLDESECTSDEEIFISQDEIQSFMANNQSFYSNREQYRQHLKEKFNKYCRLNDHKRPICSGWLTTAGAN

SEQ ID NO: 2 - protein, 133 aa, Homo sapiens
  misc_feature (1)..(1): Xaa can be any naturally occurring amino acid
XDTKGKNKKKKKKSKILKCDEHIQKLGSCITDPGNRETSGNTMHTVFHRDKTKDTHPESCCSSEKGGQPLPWFEHRKNVPQFAEPTETLFGPDSGKGAKSLVELLVSIPCGLTVHNCLGTGWMWEGIVFEGLR

SEQ ID NO: 3 - protein, 158 aa, Homo sapiens
MARLVAVCRDGEEEFPFERRQIPLYIDDTLTMVMEFPDNVLNLDGHQNNGAQLKQFIQRHGMLKQQDLSIAMVVTSREVLSALSQLVPCVGCRRSVERLFSQLVESGNPALEPLTVGPKGVLSVTRSCMTDAKKLYTLFYVHGSKLNDMIDAIPKSKK

SEQ ID NO: 4 - protein, 68 aa, Homo sapiens
MARLVAVCRDGEEEFPFERRQIPLYIDDTLTVSGPGRAGPAAPLAAVSPPPPPPGRALRTGERVCCNS

SEQ ID NO: 5 - protein, 1447 aa, Homo sapiens
MAHSKTRTNDGKITYPPGVKEISDKISKEEMVRRLKMVVKTFMDMDQDSEEEKELYLNLALHLASDFFLKHPDKDVRLLVACCLADIFRIYAPEAPYTSPDKLKDIFMFITRQLKGLEDTKSPQFNRYFYLLENIAWVKSYNICFELEDSNEIFTQLYRTLFSVINNGHNQKVHMHMVDLMSSIICEGDTVSQELLDTVLVNLVPAHKNLNKQAYDLAKALLKRTAQAIEPYITNFFNQVLMLGKTSISDLSEHVFDLILELYNIDSHLLLSVLPQLEFKLKSNDNEERLQVVKLLAKMFGAKDSELASQNKPLWQCYLGRFNDIHVPIRLECVKFASHCLMNHPDLAKDLTEYLKVRSHDPEEAIRHDVIVSIVTAAKKDILLVNDHLLNFVRERTLDKRWRVRKEAMMGLAQIYKKYALQSAAGKDAAKQIAWIKDKLLHIYYQNSIDDRLLVERIFAQYMVPHNLETTERMKCLYYLYATLDLNAVKALNEMWKCQNLLRHQVKDLLDLIKQPKTDASVKAIFSKVMVITRNLPDPGKAQDFMKKFTQVLEDDEKIRKQLEVLVSPTCSCKQAEGCVREITKKLGNPKQPTNPFLEMIKFLLERIAPVHIDTESISALIKQVNKSIDGTADDEDEGVPTDQAIRAGLELLKVLSFTHPISFHSAETFESLLACLKMDDEKVAEAALQIFKNTGSKIEEDFPHIRSALLPVLHHKSKKGPPRQAKYAIHCIHAIFSSKETQFAQIFEPLHKSLDPSNLEHLITPLVTIGHIALLAPDQFAAPLKSLVATFIVKDLLMNDRLPGKKTTKLWVPDEEVSPETMVKIQAIKMMVRWLLGMKNNHSKSGTSTLRLLTTILHSDGDLTEQGKISKPDMSRLRLAAGSAIVKLAQEPCYHEIITLEQYQLCALAINDECYQVRQVFAQKLHKGLSRLRLPLEYMAICALCAKDPVKERRAHARQCLVKNINVRREYLKQHAAVSEKLLSLLPEYVVPYTIHLLAHDPDYVKVQDIEQLKDVKECLWFVLEILMAKNENNSHAFIRKMVENIKQTKDAQGPDDAKMNEKLYTVCDVAMNIIMSKSTTYSLESPKDPVLPARFFTQPDKNFSNTKNYLPPEMKSFFTPGKPKTTNVLGAVNKPLSSAGKQSQTKSSRMETVSNASSSSNPSSPGRIKGRLDSSEMDHSENEDYTMSSPLPGKKSDKRDDSDLVRSELEKPRGRKKTPVTEQEEKLGMDDLTKLVQEQKPKGSQRSRKRGHTASESDEQQWPEEKRLKEDILENEDEQNSPPKKGKRGRPPKPLGGGTPKEEPTMKTSKKGSKKKSGPPAPEEEEEEERQSGNTEQKSKSKQHRVSRRAQQRAESPESSAIESTQSTPQKGRGRPSKTPSPSQPKKNVRVGRSKQAATKENDSSEEVDVFQGSSPVDDIPQEETEEEEVSTVNVRRRSAKRERR

SEQ ID NO: 6 - protein, 1391 aa, Homo sapiens
MAHSKTRTNDGKITYPPGVKEISDKISKEEMVRRLKMVVKTFMDMDQDSEEEKELYLNLALHLASDFFLKHPDKDVRLLVACCLADIFRIYAPEAPYTSPDKLKDIFMFITRQLKGLEDTKSPQFNRYFYLLENIAWVKSYNICFELEDSNEIFTQLYRTLFSVINNGHNQKVHMHMVDLMSSIICEGDTVSQELLDTVLVNLVPAHKNLNKQAYDLAKALLKRTAQAIEPYITNFFNQVLMLGKTSISDLSEHVFDLILELYNIDSHLLLSVLPQLEFKLKSNDNEERLQVVKLLAKMFGAKDSELASQNKPLWQCYLGRFNDIHVPIRLECVKFASHCLMNHPDLAKDLTEYLKVRSHDPEEAIRHDVIVSIVTAAKKDILLVNDHLLNFVRERTLDKRWRVRKEAMMGLAQIYKKYALQSAAGKDAAKQIAWIKDKLLHIYYQNSIDDRLLVERIFAQYMVPHNLETTERMKCLYYLYATLDLNAVKALNEMWKCQNLLRHQVKDLLDLIKQPKTDASVKAIFSKVMVITRNLPDPGKAQDFMKKFTQVLEDDEKIRKQLEVLVSPTCSCKQAEGCVREITKKLGNPKQPTNPFLEMIKFLLERIAPVHIDTESISALIKQVNKSIDGTADDEDEGVPTDQAIRAGLELLKVLSFTHPISFHSAETFESLLACLKMDDEKVAEAALQIFKNTGSKIEEDFPHIRSALLPVLHHKSKKGPPRQAKYAIHCIHAIFSSKETQFAQIFEPLHKSLDPSNLEHLITPLVTIGHIALLAPDQFAAPLKSLVATFIVKDLLMNDRLPGKKTTKLWVPDEEVSPETMVKIQAIKMMVRWLLGMKNNHSKSGTSTLRLLTTILHSDGDLTEQGKISKPDMSRLRLAAGSAIVKLAQEPCYHEIITLEQYQLCALAINDECYQVRQVFAQKLHKGLSRLRLPLEYMAICALCAKDPVKERRAHARQCLVKNINVRREYLKQHAAVSEKLLSLLPEYVVPYTIHLLAHDPDYVKVQDIEQLKDVKECLWFVLEILMAKNENNSHAFIRKMVENIKQTKDAQGPDDAKMNEKLYTVCDVAMNIIMSKSTTYSLESPKDPVLPARFFTQPDKNFSNTKNYLPPEMKSFFTPGKPKTTNVLGAVNKPLSSAGKQSQTKSSRMETVSNASSSSNPSSPGRIKGRLDSSEMDHSENEDYTMSSPLPGKKSDKRDDSDLVRSELEKPRGRKKTPVTEQEEKLGMDDLTKLVQEQKPKGSQRSRKRGHTASESDEQQWPEEKRLKEDILENEDEQNSPPKKGKRGRPPKPLGGGTPKEEPTMKTSKKGSKKKSGPPAPEEEEEEERQSGNTEQKSKSKQHRVSRRAQQRAESPESSAIESTQSTPQKGRGRPSKTPSPSQPKKNV

SEQ ID NO: 7 - protein, 302 aa, Homo sapiens
IKQTKDAQGPDDAKMNEKLYTVCDVAMNIIMSKSTTYSLESPKDPVLPARFFTQPDKNFSNTKNYLPPEMKSFFTPGKPKTTNVLGAVNKPLSSAGKQSQTKSSRMETVSNASSSSNPSSPGRIKGRLDSSEMDHSENEDYTMSSPLPGKKSDKRDDSDLSELEKPRGRKKTPVTEQEEKLGMDDLTKLVQEQKPKGSQRSRKRGHTASESDEQQWPEEKRLKEDILENEDEQNSPPKKGKRGRPPKPLGGGTPKEEPTMKTSKKGSKKKSGPPAPEEEEEEERQSGNTEQKSKSKQHRVSR

SEQ ID NO: 8 - protein, 209 aa, Homo sapiens
EGDTGGPAVWKTRLRCALNKSSEFKEVPERGRMDVAEPYKVYQLLPPGIVSGQPGTQKVPSKRQHSSVSSERKEEEDAMQNCTLSPSVLQDSLNNEEEGASGGAVHSDIGSSSSSSSPEPQEVTDTTEAPFQGDQRSLEFLLPPEPDLVRYFQGLGPPPKFQVTLNFWEESHGSSHTPQNLITVKMEQAFARYLLEQTPEQQAAILSLV

SEQ ID NO: 9 - protein, 393 aa, Homo sapiens
MASGRARCTRKLRNWVVEQVESGQFPGVCWDDTAKTMFRIPWKHAGKQDFREDQDAAFFKAWAIFKGKYKEGDTGGPAVWKTRLRCALNKSSEFKEVPERGRMDVAEPYKVYQLLPPGIVSGQPGTQKVPSKRQHSSVSSERKEEEDAMQNCTLSPSVLQDSLNNEEEGASGGAVHSDIGSSSSSSSPEPQEVTDTTEAPFQGDQRSLEFLLPPEPDYSLLLTFIYNGRVVGEAQVQSLDCRLVAEPSGSESSMEQVLFPKPGPLEPTQRLLSQLERGILVASNPRGLFVQRLCPIPISWNAPQAPPGPGPHLLPSNECVELFRTAYFCRDLVRYFQGLGPPPKFQVTLNFWEESHGSSHTPQNLITVKMEQAFARYLLEQTPEQQAAILSLV

SEQ ID NO: 10 - protein, 50 aa, Homo sapiens
MASGRARCTRKLRNWVVEQVESGQFPGVCWDDTAKTMFRIPWKHAGLGNI

SEQ ID NO: 11 - protein, 353 aa, Homo sapiens
MDVAEPYKVYQLLPPGIVSGQPGTQKVPSKRQHSSVSSERKEEEDAMQNCTLSPSVLQDSLNNEEEGASGGAVHSDIGSSSSSSSPEPQEVTDTTEAPFQGDQRSLEFLLPPEPDYSLLLTFIYNGRVVGEAQVQSLDCRLVAEPSGSESSMEQVLFPKPGPLEPTQRLLSQLERGILVASNPRGLFVQRLCPIPISWNAPQAPPGPGPHLLPSNECVELFRTAYFCRDPPCSLCMALLRLCVAYPVWPYAQPGSYLAALLQPRQWKRWFRLGQVLSGPGPPTEVPGNTEFLGREPWLQPYSTESYHSEDGAGLCPILAGADSRAAGSHSVPGVEPGGPIFHLTSLFFLSPLK

SEQ ID NO: 12 - protein, 267 aa, Homo sapiens
MASGRARCTRKLRNWVVEQVESGQFPGVCWDDTAKTMFRIPWKHAGKQDFREDQDAAFFKAWAIFKGKYKEGDTGGPAVWKTRLRCALNKSSEFKEVPERGRMDVAEPYKVYQLLPPGIVSGQPGTQKVPSKRQHSSVSSERKEEEDAMQNCTLSPSVLQDSLNNEEEGASGGAVHSDIGSSSSSSSPEPQEVTDTTEAPFQGDQRSLEFLLPPEPAPGRAVLSPDYSLLLTFIYNGRVVGEAQVQSLDCRLVAEPSGSESSMEQVL

SEQ ID NO: 13 - protein, 179 aa, Homo sapiens
MASGRARCTRKLRNWVVEQVESGQFPGVCWDDTAKTMFRIPWKHAGKQDFREDQDAAFFKAWAIFKGKYKEGDTGGPAVWKTRLRCALNKSSEFKEVPERGRMDVAEPYKVYQLLPPGIVSGQPGTQKVPSKRQHSSVSSERKEEEDAMQNCTLSPSVLQDSLNNLQTQLRPPFKGIRG

SEQ ID NO: 14 - protein, 272 aa, Homo sapiens
MEAQGVAEGAGPGAASGVPHPAALAPAAAPTLAPASVAAAASQFTLLVMQPCAGQDEAAAPGGSVGAGKPVRYLCEGAGDGEEEAGEDEADLLDTSDPPGGGESAASLEDLEDEETHSGGEGSSGGARRRGSGGGSMSKTCTYEGCSETTSQVAKQRKPWMCKKHRNKMYKDKYKKKKSDQALNCGGTASTGSAGNVKLEESADNILSIVKQRTGSFGDRPARPTLLEQVLNQKRLSLLRSPEVVQFLQKQQQLLNQQVLEQRQQQFPGTSM

SEQ ID NO: 15 - protein, 557 aa, Homo sapiens
MMVVLLGATTLVLVAVAPWVLSAAAGGKNLKSPQKVEVDIIDDNFILRWNRSDESVGNVTFSFDYQKTGMDNWIKLSGCQNITSTKCNFSSLKLNVYEEIKLRIRAEKENTSSWYEVDSFTPFRKAQIGPPEVHLEAEDKAIVIHISPGTKDSVMWALDGLSFTYSLVIWKNSSGVEERIENIYSRHKIYKLSPETTYCLKVKAALLTSWKIGVYSPVHCIKTTVENELPPPENIEVSVQNQNYVLKWDYTYANMTFQVQWLHAFLKRNPGNHLYKWKQIPDCENVKTTQCVFPQNVFQKGIYLLRVQASDGNNTSFWSEEIKFDTEIQAFLLPPVFNIRSLSDSFHIYIGAPKQSGNTPVIQDYPLIYEIIFWENTSNAERKIIEKKTDVTVPNLKPLTVYCVKARAHTMDEKLNKSSVFSDAVCEKTKPGNTSKIWLIVGICIALFALPFVIYAAKVFLRCINYVFFPSLKPSSSIDEYFSEQPLKNLLLSTSEEQIEKCFIIENISTIATVEETNQTDEDHKKYSSQTSQDSGNYSNEDESESKTSEELQQDFV

SEQ ID NO: 16 - protein, 189 aa, Homo sapiens
MMVVLLGATTLVLVAVAPWVLSAAAGGKNLKSPQKVEVDIIDDNFILRWNRSDESVGNVTFSFDYQKTGMDNWIKLSGCQNITSTKCNFSSLKLNVYEEIKLRIRAEKENTSSWYEVDSFTPFRKVENELPPPENIEVSVQNQNYVLKWDYTYANMTFQVQWLHAFLKRNPGNHLYKWKQIPDCENVKT

SEQ ID NO: 17 - protein, 67 aa, Homo sapiens
MMVVLLGATTLVLVAVAPWVLSAAAGGKNLKSPQKVEVDIIDDNFILRWNRSDESVGNVTFSFDYQN

SEQ ID NO: 18 - protein, 236 aa, Homo sapiens
MMVVLLGATTLVLVAVAPWVLSAAAGGKNLKSPQKVEVDIIDDNFILRWNRSDESVGNVTFSFDYQKTGMDNWIKLSGCQNITSTKCNFSSLKLNVYEEIKLRIRAEKENTSSWYEVDSFTPFRKAQIGPPEVHLEAEDKAIVIHISPGTKDSVMWALDGLSFTYSLVIWKNSSGVEERIENIYSRHKIYKLSPETTYCLKVKAALLTSWKIGVYSPVHCIKTTVCILGGRGRWIT

SEQ ID NO: 19 - protein, 128 aa, Homo sapiens
MMVVLLGATTLVLVAVAPWVLSAAAGGKNLKSPQKVEVDIIDDNFILRWNRSDESVGNVTFSFDYQKTGMDNWIKLSGCQNITSTKCNFSSLKLNVYEEIKLRIRAEKENTSSWYEVDSFTPFRKGKD

SEQ ID NO: 20 - protein, 270 aa, Homo sapiens
MMVVLLGATTLVLVAVAPWVLSAAAGGKNLKSPQKVEVDIIDDNFILRWNRSDESVGNVTFSFDYQKTGMDNWIKLSGCQNITSTKCNFSSLKLNVYEEIKLRIRAEKENTSSWYEVDSFTPFRKAQIGPPEVHLEAEDKAIVIHISPGTKDSVMWALDGLSFTYSLVIWKNSSGVEERIENIYSRHKIYKLSPETTYCLKVKAALLTSWKIGVYSPVHCIKTTVENELPPPENIEVSVQNQNYVLKWDYTYANMTFQVQWLHLYFRRPR

SEQ ID NO: 21 - protein, 488 aa, Homo sapiens
MDNWIKLSGCQNITSTKCNFSSLKLNVYEEIKLRIRAEKENTSSWYEVDSFTPFRKAQIGPPEVHLEAEDKAIVIHISPGTKDSVMWALDGLSFTYSLVIWKNSSGVEERIENIYSRHKIYKLSPETTYCLKVKAALLTSWKIGVYSPVHCIKTTVENELPPPENIEVSVQNQNYVLKWDYTYANMTFQVQWLHAFLKRNPGNHLYKWKQIPDCENVKTTQCVFPQNVFQKGIYLLRVQASDGNNTSFWSEEIKFDTEIQAFLLPPVFNIRSLSDSFHIYIGAPKQSGNTPVIQDYPLIYEIIFWENTSNAERKIIEKKTDVTVPNLKPLTVYCVKARAHTMDEKLNKSSVFSDAVCEKTKPGNTSKIWLIVGICIALFALPFVIYAAKVFLRCINYVFFPSLKPSSSIDEYFSEQPLKNLLLSTSEEQIEKCFIIENISTIATVEETNQTDEDHKKYSSQTSQDSGNYSNEDESESKTSEELQQDFV

SEQ ID NO: 22 - protein, 390 aa, Homo sapiens
MVTRAGAGTAVAGAVVVALLSAALALYGPPLDAVLERAFSLRKAHSIKDMENTLQLVRNIIPPLSSTKHKGQDGRIGVVGGCQEYTGAPYFAAISALKVGADLSHVFCASAAAPVIKAYSPELIVHPVLDSPNAVHEVEKWLPRLHALVVGPGLGRDDALLRNVQGILEVSKARDIPVVIDADGLWLVAQQPALIHGYRKAVLTPNHVEFSRLYDAVLRGPMDSDDSHGSVLRLSQALGNVTVVQKGERDILSNGQQVLVCSQEGSSRRCGGQGDLLSGSLGVLVHWALLAGPQKTNGGISDLKLTIWGPEIETGVKTRAQGSCGPRTTTPTSPHLLLSPSPQVQPSPGGRVWRLLSHQAVQPPSLPEARSLHHHLRHDRRGGGRLQQAL

SEQ ID NO: 23 - protein, 237 aa, Homo sapiens
MLPDGPGSSLWGNPGLQTSDSPNAVHEVEKWLPRLHALVVGPGLGRDDALLRNVQGILEVSKARDIPVVIDADGLWLVAQQPALIHGYRKAVLTPNHVEFSRLYDAVLRGPMDSDDSHGSVLRLSQALGNVTVVQKGERDILSNGQQVLVCSQEGSSRRCGGQGDLLSGSLGVLVHWALLAGPQKTNGSSPLLVAAFGACSLTRQCNHQAFQKHGRSTTTSDMIAEVGAAFSKLFET

SEQ ID NO: 24 - protein, 391 aa, Homo sapiens
MSGPVPSRARVYTDVNTHRPREYWDYESHVVEWGNQDDYQLVRKLGRGKYSEVFEAINITNNEKVVVKILKPVKKKKIKREIKILENLRGGPNIITLADIVKDPVSRTPALVFEHVNNTDFKQLYQTLTDYDIRFYMYEILKALDYCHSMGIMHRDVKPHNVMIDHEHRKLRLIDWGLAEFYHPGQEYNVRVASRYFKGPELLVDYQMYDYSLDMWSLGCMLASMIFRKEPFFHGHDNYDQLVRIAKVLGTEDLYDYIDKYNIELDPRFNDILGRHSRKRWERFVHSENQHLVSPEALDFLDKLLRYDHQSRLTAREAMEHPYFYTVVKDQARMGSSSMPGGSTPVSSANMMSGISSVPTPSPLGPLAGSPVIAAANPLGMPVPAAAGAQQ

SEQ ID NO: 25 - protein, 255 aa, Homo sapiens
MYEILKALDYCHSMGIMHRDVKPHNVMIDHEHRKLRLIDWGLAEFYHPGQEYNVRVASRYFKGPELLVDYQMYDYSLDMWSLGCMLASMIFRKEPFFHGHDNYDQLVRIAKVLGTEDLYDYIDKYNIELDPRFNDILGRHSRKRWERFVHSENQHLVSPEALDFLDKLLRYDHQSRLTAREAMEHPYFYTVVKDQARMGSSSMPGGSTPVSSANMMSGISSVPTPSPLGPLAGSPVIAAANPLGMPVPAAAGAQQ

SEQ ID NO: 26 - protein, 385 aa, Homo sapiens
MSGPVPSRARVYTDVNTHRPREYWDYESHVVEWGNQDDYQLVRKLGRGKYSEVFEAINITNNEKVVVKILKPVKKKKIKREIKILENLRGGPNIITLADIVKDPVSRTPALVFEHVNNTDFKQLYQTLTDYDIRFYMYEILKALDYCHSMGIMHRDVKPHNVMIDHEHRKLRLIDWGLAEFYHPGQEYNVRVASRYFKGPELLVDYQMYDYSLDMWSLGCMLASMIFRKEPFFHGHDNYDQLVRIAKVLGTEDLYDYIDKYNIELDPRFNDILGRHSRKRWERFVHSENQHLVSPEALDFLDKLLRYDHQSRLTAREAMEHPYFYTVVKDQARMGSSSMPGGSTPVSSANMMSEMKFCRVAQAGLELLSSTVYPPWPPKVLRLEA

SEQ ID NO: 27 - protein, 43 aa, Homo sapiens
MYEILKALDYCHSMGIMHRDVKPHNVMIDHEHRKLRLIDWGLA

SEQ ID NO: 28 - protein, 117 aa, Homo sapiens
MSGPVPSRARVYTDVNTHRPREYWDYESHVVEWGNQDDYQLVRKLGRGKYSEVFEAINITNNEKVVVKILKPVKKKKIKREIKILENLRGGPNIITLADIVKDPVAKRLIALETEMC

SEQ ID NO: 29 - protein, 133 aa, Homo sapiens
MSGPVPSRARVYTDVNTHRPREYWDYESHVVEWGNQDDYQLVRKLGRGKYSEVFEAINITNNEKVVVKILKPVKKKKIKREIKILENLRGGPNIITLADIVKDPVSRTPALVFEHVNNTDFKQLYQTLTDYDI

SEQ ID NO: 30 - protein, 74 aa, Homo sapiens
MSGPVPSRARVYTDVNTHRPREYWDYESHVVEWGNQDDYQLVRKLGRGKYSEVFEAINITNNEKVVVKILKPVK

SEQ ID NO: 31 - protein, 207 aa, Homo sapiens
MSGPVPSRARVYTDVNTHRPREYWDYESHVVEWGNQDDYQLVRKLGRGKYSEVFEAINITNNEKVVVKILKPVKKKKIKREIKILENLRGGPNIITLADIVKDPVSRTPALVFEHVNNTDFKQLYQTLTDYDIRFYMYEILKALDYCHSMGIMHRDVKPHNVMIDHEHRKLRLIDWGLAEFYHPGQEYNVRVASRYFKGPELLVDYQ

SEQ ID NO: 32 - protein, 152 aa, Homo sapiens
MSGPVPSRARVYTDVNTHRPREYWDYESHVVEWGNQDDYQLVRKLGRGKYSEVFEAINITNNEKVVVKILKYLLFTTATTANPASQKYAIARSITQSITRSVTQSNVETTNHLKLAVHPVSGRFNDGLMCLPQKCKVFHSIPVHCWGASHAL

SEQ ID NO: 33 - protein, 131 aa, Homo sapiens
MSGPVPSRARVYTDVNTHRPREYWDYESHVVEWGNQDDYQLVRKLGRGKYSEVFEAINITNNEKVVVKILKSRTPALVFEHVNNTDFKQLYQTLTDYDIRFYMYEILKALDYCHSMGIMHRDVKPHNVMID

SEQ ID NO: 34 - protein, 86 aa, Homo sapiens
MSGPVPSRARVYTDVNTHRPREYWDYESHVVEWGNQDDYQLVRKLGRGKYSEVFEAINITNNEKVVVKILKVSTRDNFRGIWNIDF

SEQ ID NO: 35 - protein, 363 aa, Homo sapiens
MSGPVPSRARVYTDVNTHRPREYWDYESHVVEWGNQDDYQLVRKLGRGKYSEVFEAINITNNEKVVVKILKPVKKKKIKREIKILENLRGGPNIITLADIVKDPVSRTPALVFEHVNNTDFKQLYQTLTDYDIRFYMYEILKLRLIDWGLAEFYHPGQEYNVRVASRYFKGPELLVDYQMYDYSLDMWSLGCMLASMIFRKEPFFHGHDNYDQLVRIAKVLGTEDLYDYIDKYNIELDPRFNDILGRHSRKRWERFVHSENQHLVSPEALDFLDKLLRYDHQSRLTAREAMEHPYFYTVVKDQARMGSSSMPGGSTPVSSANMMSGISSVPTPSPLGPLAGSPVIAAANPLGMPVPAAAGAQQ

SEQ ID NO: 36 - protein, 374 aa, Homo sapiens
MSGPVPSRARVYTDVNTHRPREYWDYESHVVEWGNQDDYQLVRKLGRGKYSEVFEAINITNNEKVVVKILKPVKKKKIKREIKILENLRGGPNIITLADIVKDPVQLYQTLTDYDIRFYMYEILKALDYCHSMGIMHRDVKPHNVMIDHEHRKLRLIDWGLAEFYHPGQEYNVRVASRYFKGPELLVDYQMYDYSLDMWSLGCMLASMIFRKEPFFHGHDNYDQLVRIAKVLGTEDLYDYIDKYNIELDPRFNDILGRHSRKRWERFVHSENQHLVSPEALDFLDKLLRYDHQSRLTAREAMEHPYFYTVVKDQARMGSSSMPGGSTPVSSANMMSGISSVPTPSPLGPLAGSPVIAAANPLGMPVPAAAGAQQ

SEQ ID NO: 37 - protein, 88 aa, Homo sapiens
MSGPVPSRARVYTDVNTHRPREYWDYESHVVEWGNQDDYQLVRKLGRGKYSEVFEAINITNNEKVVVKILKYLQNTWHSARRRIQRRM

SEQ ID NO: 38 - protein, 34 aa, Homo sapiens
MSGPVPSRARVYTDVNTHRPREYWDYESHVVEWG

SEQ ID NO: 39 - protein, 256 aa, Homo sapiens
MSGPVPSRARVYTDVNTHRPREYWDYESHVVEWGNQDDYQLVRKLGRGKYSEVFEAINITNNEKVVVKILKPVKKKKIKREIKILENLRGGPNIITLADIVKDPVSRTPALVFEHVNNTDFKQLYQTLTDYDIRFYMYEILKALDYCHSMGIMHRDVKPHNVMIDHEHRKLRLIDWGLAEFYHPGQEYNVRVASRYFKGPELLVDYQMYDYSLDMWSLGCMLASMIFRKEPFFHGHDNYDQVIYVIPIEKCTGLMQ

SEQ ID NO: 40 - protein, 118 aa, Homo sapiens
DYIDKYNIELDPRFNDILGRHSRKRWERFVHSENQHLVSPEALDFLDKLLRYDHQSRLTAREAMEHPYFYTVVKDQARMGSSSMPGGSTPVSSANMMSEPQFEGQRDIHHAAVRLGQL

SEQ ID NO: 41 - protein, 354 aa, Homo sapiens
MSGPVPSRARVYTDVNTHRPREYWDYESHVVEWGNQDDYQLVRKLGRGKYSEVFEAINITNNEKVVVKILKPVKKKKIKREIKILENLRGGPNIITLADIVKDPVALDYCHSMGIMHRDVKPHNVMIDHEHRKLRLIDWGLAEFYHPGQEYNVRVASRYFKGPELLVDYQMYDYSLDMWSLGCMLASMIFRKEPFFHGHDNYDQLVRIAKVLGTEDLYDYIDKYNIELDPRFNDILGRHSRKRWERFVHSENQHLVSPEALDFLDKLLRYDHQSRLTAREAMEHPYFYTVVKDQARMGSSSMPGGSTPVSSANMMSGISSVPTPSPLGPLAGSPVIAAANPLGMPVPAAAGAQQ

SEQ ID NO: 42 - protein, 92 aa, Homo sapiens
MSGPVPSRARVYTDVNTHRPREYWDYESHVVEWGNQDDYQLVRKLGRGKYSEVFEAINITNNEKVVVKILKPVKKKKIKREIKILENLRGGP

SEQ ID NO: 43 - protein, 94 aa, Homo sapiens
MSGPVPSRARVYTDVNTHRPREYWDYESHVVEWGNQDDYQLVRKLGRGKYSEVFEAINITNNEKVVVKILKSQVLEGLKWEDRLSLEVEGCTDL

SEQ ID NO: 44 - protein, 354 aa, Homo sapiens
MSGPVPSRARVYTDVNTHRPREYWDYESHVVEWGNQDDYQLVRKLGRGKYSEVFEAINITNNEKVVVKILKPVKKKKIKREIKILENLRGGPNIITLADIVKDPVSRTPALVFEHVNNTDFKQLYQTLTDYDIRFYMYEILKALDYCHSMGIMHRDVKPHNVMIDHEHRKMYDYSLDMWSLGCMLASMIFRKEPFFHGHDNYDQLVRIAKVLGTEDLYDYIDKYNIELDPRFNDILGRHSRKRWERFVHSENQHLVSPEALDFLDKLLRYDHQSRLTAREAMEHPYFYTVVKDQARMGSSSMPGGSTPVSSANMMSGISSVPTPSPLGPLAGSPVIAAANPLGMPVPAAAGAQQ

SEQ ID NO: 45 - protein, 376 aa, Homo sapiens
MSGPVPSRARVYTDVNTHRPREYWDYESHVVEWGNQDDYQLVRKLGRGKYSEVFEAINITNNEKVVVKILKPVKKKKIKREIKILENLRGGPNIITLADIVKDPVSRTPALVFEHVNNTDFKQLYQTLTDYDIRFYMYEILKALDYCHSMGIMHRDVKPHNVMIDHEHRKLRLIDWGLAEFYHPGQEYNVRVASRYFKGPELLVDYQMYDYSLDMWSLGCMLASMIFRKEPFFHGHDNYDQLVRIAKVLGTEDLYDYIDKYNIELDPRFNDILGRHSRKRWERFVHSENQHLVSPEALDFLDKLLRYDHQSRLTAREAMEHPYFYTVVKDQARMGSSSMPGGSTPVSSANMMSALFFQGFLQCQPLHPLDLWQAHQ

SEQ ID NO: 46 - protein, 144 aa, Homo sapiens
MSGPVPSRARVYTDVNTHRPREYWDYESHVVEWGNQDDYQLVRKLGRGKYSEVFEAINITNNEKVVVKILKPVKKKKIKREIKILENLRGGPNIITLADIVKDPVSRTPALVFEHVNNTDFKQLYQTLTDYDIRFYMYEILKAL

SEQ ID NO: 47 - protein, 466 aa, Homo sapiens
MEPWPCSPGGGGGTRARHVIINVGGCRVRLAWAALARCPLARLERLRACRGHDDLLRVCDDYDVSRDEFFFDRSPCAFRAIVALLRAGKLRLLRGPCALAFRDELAYWGIDEARLERCCLRRLRRREEEAAEARAGPTERGAQGSPARALGPRGRLQRGRRRLRDVVDNPHSGLAGKLFACVSVSFVAVTAVGLCLSTMPDIRAEEERGECSPKCRSLFVLETVCVAWFSFEFLLRSLQAESKCAFLRAPLNIIDILALLPFYVSLLLGLAAGPGGTKLLERAGLVLRLLRALRVLYVMRLARHSLGLRSLGLTMRRCAREFGLLLLFLCVAMALFAPLVHLAERELGARRDFSSVPASYWWAVISMTTVGYGDMVPRSLPGQVVALSSILSGILLMAFPVTSIFHTFSRSYSELKEQQQRAASPEPALQEDSTHSATATEDSSQGPDSAGLADDSADALWVRAGR

SEQ ID NO: 48 - protein, 287 aa, Homo sapiens
MAQEKMELDLELPPGTGGSPAEGGGSGGGGGLRRSNSAPLIHGLSDTSPVFQAEAPSARRNSTTFPSRHGLLLPASPVRMHSSRLHQIKQEEGMDLINRETVHEREVQTAMQISHSWEESFSLSDNDVEKSASPKRIDFIPVSPAPSPTRGIGKQCFSPSLQSFVSSNGLPPSPIPSPTTRFTTRRSQSPINCIRPSVLGPLKRKCEMETEYQPKRFFQGITNMLSSDVAQLSDPGVCVSSDTLDGNSSSAGSSCNSPAKVSTTTDSPVSPAQAASPFIPLDELSSK

SEQ ID NO: 49 - protein, 3065 aa, Homo sapiens
MEEKQQIILANQDGGTVAGAAPTFFVILKQPGNGKTDQGILVTNQDACALASSVSSPVKSKGKICLPADCTVGGITVTLDNNSMWNEFYHRSTEMILTKQGRRMFPYCRYWITGLDSNLKYILVMDISPVDNHRYKWNGRWWEPSGKAEPHVLGRVFIHPESPSTGHYWMHQPVSFYKLKLTNNTLDQEGHIILHSMHRYLPRLHLVPAEKAVEVIQLNGPGVHTFTFPQTEFFAVTAYQNIQITQLKIDYNPFAKGFRDDGLNNKPQRDGKQKNSSDQEGNNISSSSGHRVRLTEGQGSEIQPGDLDPLSRGHETSGKGLEKTSLNIKRDFLGFMDTDSALSEVPQLKQEISECLIASSFEDDSRVASPLDQNGSFNVVIKEEPLDDYDYELGECPEGVTVKQEETDEETDVYSNSDDDPILEKQLKRHNKVDNPEADHLSSKWLPSSPSGVAKAKMFKLDTGKMPVVYLEPCAVTRSTVKISELPDNMLSTSRKDKSSMLAELEYLPTYIENSNETAFCLGKESENGLRKHSPDLRVVQKYPLLKEPQWKYPDISDSISTERILDDSKDSVGDSLSGKEDLGRKRTTMLKIATAAKVVNANQNASPNVPGKRGRPRKLKLCKAGRPPKNTGKSLISTKNTPVSPGSTFPDVKPDLEDVDGVLFVSFESKEALDIHAVDGTTEESSSLQASTTNDSGYRARISQLEKELIEDLKTLRHKQVIHPGLQEVGLKLNSVDPTMSIDLKYLGVQLPLAPATSFPFWNLTGTNPASPDAGFPFVSRTGKTNDFTKIKGWRGKFHSASASRNEGGNSESSLKNRSAFCSDKLDEYLENEGKLMETSMGFSSNAPTSPVVYQLPTKSTSYVRTLDSVLKKQSTISPSTSYSLKPHSVPPVSRKAKSQNRQATFSGRTKSSYKSILPYPVSPKQKYSHVILGDKVTKNSSGIISENQANNFVVPTLDENIFPKQISLRQAQQQQQQQQGSRPPGLSKSQVKLMDLEDCALWEGKPRTYITEERADVSLTTLLTAQASLKTKPIHTIIRKRAPPCNNDFCRLGCVCSSLALEKRQPAHCRRPDCMFGCTCLKRKVVLVKGGSKTKHFQRKAAHRDPVFYDTLGEEAREEEEGIREEEEQLKEKKKRKKLEYTICETEPEQPVRHYPLWVKVEGEVDPEPVYIPTPSVIEPMKPLLLPQPEVLSPTVKGKLLTGIKSPRSYTPKPNPVIREEDKDPVYLYFESMMTCARVRVYERKKEDQRQPSSSSSPSPSFQQQTSCHSSPENHNNAKEPDSEQQPLKQLTCDLEDDSDKLQEKSWKSSCNEGESSSTSYMHQRSPGGPTKLIEIISDCNWEEDRNKILSILSQHINSNMPQSLKVGSFIIELASQRKSRGEKNPPVYSSRVKISMPSCQDQDDMAEKSGSETPDGPLSPGKMEDISPVQTDALDSVRERLHGGKGLPFYAGLSPAGKLVAYKRKPSSSTSGLIQVASNAKVAASRKPRTLLPSTSNSKMASSSGTATNRPGKNLKAFVPAKRPIAARPSPGGVFTQFVMSKVGALQQKIPGVSTPQTLAGTQKFSIRPSPVMVVTPVVSSEPVQVCSPVTAAVTTTTPQVFLENTTAVTPMTAISDVETKETTYSSGATTTGVVEVSETNTSTSVTSTQSTATVNLTKTTGITTPVASVAFPKSLVASPSTITLPVASTASTSLVVVTAAASSSMVTTPTSSLGSVPIILSGINGSPPVSQRPENAAQIPVATPQVSPNTVKRAGPRLLLIPVQQGSPTLRPVSNTQLQGHRMVLQPVRSPSGMNLFRHPNGQIVQLLPLHQLRGSNTQPNLQPVMFRNPGSVMGIRLPAPSKPSETPPSSTSSSAFSVMNPVIQAVGSSSAVNVITQAPSLLSSGASFVSQAGTLTLRISPPEPQSFASKTGSETKITYSSGGQPVGTASLIPLQSGSFALLQLPGQKPVPSSILQHVASLQMKRESQNPDQKDETNSIKREQETKKVLQSEGEAVDPEANVIKQNSGAATSEETLNDSLEDRGDHLDEECLPEEGCATVKPSEHSCITGSHTDQDYKDVNEEYGARNRKSSKEKVAVLEVRTISEKASNKTVQNLSKVQHQKLGDVKVEQQKGFDNPEENSSEFPVTFKEESKFELSGSKVMEQQSNLQPEAKEKECGDSLEKDRERWRKHLKGPLTRKCVGASQECKKEADEQLIKETKTCQENSDVFQQEQGISDLLGKSGITEDARVLKTECDSWSRISNPSAFSIVPRRAAKSSRGNGHFQGHLLLPGEQIQPKQEKKGGRSSADFTVLDLEEDDEDDNEKTDDSIDEIVDVVSDYQSEEVDDVEKNNCVEYIEDDEEHVDIETVEELSEEINVAHLKTTAAHTQSFKQPSCTHISADEKAAERSRKAPPIPLKLKPDYWSDKLQKEAEAFAYYRRTHTANERRRRGEMRDLFEKLKITLGLLHSSKVSKSLILTRAFSEIQGLTDQADKLIGQKNLLTRKRNILIRKVSSLSGKTEEVVLKKLEYIYAKQQALEAQKRKKKMGSDEFDISPRISKQQEGSSASSVDLGQMFINNRRGKPLILSRKKDQATENTSPLNTPHTSANLVMTPQGQLLTLKGPLFSGPVVAVSPDLLESDLKPQVAGSAVALPENDDLFMMPRIVNVTSLATEGGLVDMGGSKYPHEVPDSKPSDHLKDTVRNEDNSLEDKGRISSRGNRDGRVTLGPTQVFLANKDSGYPQIVDVSNMQKAQEFLPKKISGDMRGIQYKWKESESRGERVKSKDSSFHKLKMKDLKDSSIEMELRKVTSAIEEAALDSSELLTNMEDEDDTDETLTSLLNEIAFLNQQLNDDSVGLAELPSSMDTEFPGDARRAFISKVPPGSRATFQVEHLGTGLKELPDVQGESDSISPLLLHLEDDDFSENEKQLAEPASEPDVLKIVIDSEIKDSLLSNKKAIDGGKNTSGLPAEPESVSSPPTLHMKTGLENSNSTDTLWRPMPKLAPLGLKVANPSSDADGQSLKVMPCLAPIAAKVGSVGHKMNLTGNDQEGRESKVMPTLAPVVAKLGNSGASPSSAGK

SEQ ID NO: 50 - protein, 1138 aa, Homo sapiens
MEEKQQIILANQDGGTVAGAAPTFFVILKQPGNGKTDQGILVTNQDACALASSVSSPVKSKGKICLPADCTVGGITVTLDNNSMWNEFYHRSTEMILTKQGRRMFPYCRYWITGLDSNLKYILVMDISPVDNHRYKWNGRWWEPSGKAEPHVLGRVFIHPESPSTGHYWMHQPVSFYKLKLTNNTLDQEGHIILHSMHRYLPRLHLVPAEKAVEVIQLNGPGVHTFTFPQTEFFAVTAYQNIQITQLKIDYNPFAKGFRDDGLNNKPQRDGKQKNSSDQEGNNISSSSGHRVRLTEGQGSEIQPGDLDPLSRGHETSGKGLEKTSLNIKRDFLGFMDTDSALSEVPQLKQEISECLIASSFEDDSRVASPLDQNGSFNVVIKEEPLDDYDYELGECPEGVTVKQEETDEETDVYSNSDDDPILEKQLKRHNKVDNPEADHLSSKWLPSSPSGVAKAKMFKLDTGKMPVVYLEPCAVTRSTVKISELPDNMLSTSRKDKSSMLAELEYLPTYIENSNETAFCLGKESENGLRKHSPDLRVVQKYPLLKEPQWKYPDISDSISTERILDDSKDSVGDSLSGKEDLGRKRTTMLKIATAAKVVNANQNASPNVPGKRGRPRKLKLCKAGRPPKNTGKSLISTKNTPVSPGSTFPDVKPDLEDVDGVLFVSFESKEALDIHAVDGTTEESSSLQASTTNDSGYRARISQLEKELIEDLKTLRHKQVIHPGLQEVGLKLNSVDPTMSIDLKYLGVQLPLAPATSFPFWNLTGTNPASPDAGFPFVSRTGKTNDFTKIKGWRGKFHSASASRNEGGNSESSLKNRSAFCSDKLDEYLENEGKLMETSMGFSSNAPTSPVVYQLPTKSTSYVRTLDSVLKKQSTISPSTSYSLKPHSVPPVSRKAKSQNRQATFSGRTKSSYKSILPYPVSPKQKYSHVILGDKVTKNSSGIISENQANNFVVPTLDENIFPKQISLRQAQQQQQQQQGSRPPGLSKSQVKLMDLEDCALWEGKPRTYITEERADVSLTTLLTAQASLKTKPIHTIIRKRAPPCNNDFCRLGCVCSSLALEKRQPAHCRRPDCMFGCTCLKRKVVLVKGGSKTKHFQRKAAHRDPVFYDTLGEEAREEEEGIREEEEQLKEKKKR

SEQ ID NO: 51 - protein, 2856 aa, Homo sapiens
MEEKQQIILANQDGGTVAGAAPTFFVILKQPGNGKTDQGILVTNQDACALASSVSSPVKSKGKICLPADCTVGGITVTLDNNSMWNEFYHRSTEMILTKQGRRMFPYCRYWITGLDSNLKYILVMDISPVDNHRYKWNGRWWEPSGKAEPHVLGRVFIHPESPSTGHYWMHQPVSFYKLKLTNNTLDQEGHIILHSMHRYLPRLHLVPAEKAVEVIQLNGPGVHTFTFPQTEFFAVTAYQNIQITQLKIDYNPFAKGFRDDGLNNKPQRDGKQKNSSDQEGNNISSSSGHRVRLTEGQGSEIQPGDLDPLSRGHETSGKGLEKTSLNIKRDFLGFMDTDSALSEVPQLKQEISECLIASSFEDDSRVASPLDQNGSFNVVIKEEPLDDYDYELGECPEGVTVKQEETDEETDVYSNSDDDPILEKQLKRHNKVDNPEADHLSSKWLPSSPSGVAKAKMFKLDTGKMPVVYLEPCAVTRSTVKISELPDNMLSTSRKDKSSMLAELEYLPTYIENSNETAFCLGKESENGLRKHSPDLRVVQKYPLLKEPQWKYPDISDSISTERILDDSKDSVGDSLSGKEDLGRKRTTMLKIATAAKVVNANQNASPNVPGKRGRPRKLKLCKAGRPPKNTGKSLISTKNTPVSPGSTFPDVKPDLEDVDGVLFVSFESKEALDIHAVDGTTEESSSLQASTTNDSGYRARISQLEKELIEDLKTLRHKQVIHPGLQEVGLKLNSVDPTMSIDLKYLGVQLPLAPATSFPFWNLTGTNPASPDAGFPFVSRTGKTNDFTKIKGWRGKFHSASASRNEGGNSESSLKNRSAFCSDKLDEYLENEGKLMETSMGFSSNAPTSPVVYQLPTKSTSYVRTLDSVLKKQSTISPSTSYSLKPHSVPPVSRKAKSQNRQATFSGRTKSSYKSILPYPVSPKQKYSHVILGDKVTKNSSGIISENQANNFVVPTLDENIFPKQISLRQAQQQQQQQQGSRPPGLSKSQVKLMDLEDCALWEGKPRTYITEERADVSLTTLLTAQASLKTKPIHTIIRKRAPPCNNDFCRLGCVCSSLALEKRQPAHCRRPDCMFGCTCLKRKVVLVKGGSKTKHFQRKAAHRDPVFYDTLGEEAREEEEGIREEEEQLKEKKKRKKLEYTICETEPEQPVRHYPLWVKVEGEVDPEPVYIPTPSVIEPMKPLLLPQPEVLSPTVKGKLLTGIKSPRSYTPKPNPVIREEDKDPVYLYFESMMTCARVRVYERKKEDQRQPSSSSSPSPSFQQQTSCHSSPENHNNAKEPDSEQQPLKQLTCDLEDDSDKLQEKSWKSSCNEGESSSTSYMHQRSPGGPTKLIEIISDCNWEEDRNKILSILSQHINSNMPQSLKVGSFIIELASQRKSRGEKNPPVYSSRVKISMPSCQDQDDMAEKSGSETPDGPLSPGKMEDISPVQTDALDSVRERLHGGKGLPFYAGLSPAGKLVAYKRKPSSSTSGLIQVASNAKVAASRKPRTLLPSTSNSKMASSSGTATNRPGKNLKAFVPAKRPIENAAQIPVATPQVSPNTVKRAGPRLLLIPVQQGSPTLRPVSNTQLQGHRMVLQPVRSPSGMNLFRHPNGQIVQLLPLHQLRGSNTQPNLQPVMFRNPGSVMGIRLPAPSKPSETPPSSTSSSAFSVMNPVIQAVGSSSAVNVITQAPSLLSSGASFVSQAGTLTLRISPPEPQSFASKTGSETKITYSSGGQPVGTASLIPLQSGSFALLQLPGQKPVPSSILQHVASLQMKRESQNPDQKDETNSIKREQETKKVLQSEGEAVDPEANVIKQNSGAATSEETLNDSLEDRGDHLDEECLPEEGCATVKPSEHSCITGSHTDQDYKDVNEEYGARNRKSSKEKVAVLEVRTISEKASNKTVQNLSKVQHQKLGDVKVEQQKGFDNPEENSSEFPVTFKEESKFELSGSKVMEQQSNLQPEAKEKECGDSLEKDRERWRKHLKGPLTRKCVGASQECKKEADEQLIKETKTCQENSDVFQQEQGISDLLGKSGITEDARVLKTECDSWSRISNPSAFSIVPRRAAKSSRGNGHFQGHLLLPGEQIQPKQEKKGGRSSADFTVLDLEEDDEDDNEKTDDSIDEIVDVVSDYQSEEVDDVEKNNCVEYIEDDEEHVDIETVEELSEEINVAHLKTTAAHTQSFKQPSCTHISADEKAAERSRKAPPIPLKLKPDYWSDKLQKEAEAFAYYRRTHTANERRRRGEMRDLFEKLKITLGLLHSSKVSKSLILTRAFSEIQGLTDQADKLIGQKNLLTRKRNILIRKVSSLSGKTEEVVLKKLEYIYAKQQALEAQKRKKKMGSDEFDISPRISKQQEGSSASSVDLGQMFINNRRGKPLILSRKKDQATENTSPLNTPHTSANLVMTPQGQLLTLKGPLFSGPVVAVSPDLLESDLKPQVAGSAVALPENDDLFMMPRIVNVTSLATEGGLVDMGGSKYPHEVPDSKPSDHLKDTVRNEDNSLEDKGRISSRGNRDGRVTLGPTQVFLANKDSGYPQIVDVSNMQKAQEFLPKKISGDMRGIQYKWKESESRGERVKSKDSSFHKLKMKDLKDSSIEMELRKVTSAIEEAALDSSELLTNMEDEDDTDETLTSLLNEIAFLNQQLNDDSVGLAELPSSMDTEFPGDARRAFISKVPPGSRATFQVEHLGTGLKELPDVQGESDSISPLLLHLEDDDFSENEKQLAEPASEPDVLKIVIDSEIKDSLLSNKKAIDGGKNTSGLPAEPESVSSPPTLHMKTGLENSNSTDTLWRPMPKLAPLGLKVANPSSDADGQSLKVMPCLAPIAAKVGSVGHKMNLTGNDQEGRESKVMPTLAPVVAKLGNSGASPSSAGK

SEQ ID NO: 52 - protein, 1174 aa, Homo sapiens
  misc_feature (1)..(1): Xaa can be any naturally occurring amino acid
XLTCDLEDDSDKLQEKSWKSSCNEGESSSTSYMHQRSPGGPTKLIEIISDCNWEEDRNKILSILSQHINSNMPQSLKVNGKSYPQAKLLLGQMGALHPANRLAAYITGRLRPSVLDLSTLSTVISKVASNAKVAASRKPRTLLPSTSNSKMASSSGTATNRPGKNLKAFVPAKRPIAARPSPGGVFTQFVMSKVGALQQKIPGVSTPQTLAGTQKFSIRPSPVMVVTPVVSSEPVQVCSPVTAAVTTTTPQVFLENTTAVTPMTAISDVETKETTYSSGATTTGVVEVSETNTSTSVTSTQSTATVNLTKTTGITTPVASVAFPKSLVASPSTITLPVASTASTSLVVVTAAASSSMVTTPTSSLGSVPIILSGINGSPPVSQRPENAAQIPVATPQVSPNTVKRAGPRLLLIPVQQGSPTLRPVSNTQLQGHRMVLQPVRSPSGMNLFRHPNGQIVQLLPLHQLRGSNTQPNLQPVMFRNPGSVMGIRLPAPSKPSETPPSSTSSSAFSVMNPVIQAVGSSSAVNVITQAPSLLSSGASFVSQAGTLTLRISPPEPQSFASKTGSETKITYSSGGQPVGTASLIPLQSGSFALLQLPGQKPVPSSILQHVASLQMKRESQNPDQKDETNSIKREQETKKVLQSEGEAVDPEANVIKQNSGAATSEETLNDSLEDRGDHLDEECLPEEGCATVKPSEHSCITGSHTDQDYKDVNEEYGARNRKSSKEKVAVLEVRTISEKASNKTVQNLSKVQHQKLGDVKVEQQKGFDNPEENSSEFPVTFKEESKFELSGSKVMEQQSNLQPEAKEKECGDSLEKDRERWRKHLKGPLTRKCVGASQECKKEADEQLIKETKTCQENSDVFQQEQGISDLLGKSGITEDARVLKTECDSWSRISNPSAFSIVPRRAAKSSRGNGHFQGHLLLPGEQIQPKQEKKGGRSSADFTVLDLEEDDEDDNEKTDDSIDEIVDVVSDYQSEEVDDVEKNNCVEYIEDDEEHVDIETVEELSEEINVAHLKTTAAHTQSFKQPSCTHISADEKAAERSRKAPPIPLKLKPDYWSDKLQKEAEAFAYYRRTHTANERRRRGEMRDLFEKLKITLGLLHSSKVSKSLILTRAFSEIQGLTDQADKLIGQKNLLTRKRNILIRKVSSLSGKTEEVVLKKLEYIYAKQQALEA

SEQ ID NO: 53 - protein, 61 aa, Homo sapiens [sequence omitted]

SEQ ID NO: 54 - protein, 1086 aa, Homo sapiens
MEEKQQIILANQDGGTVAGAAPTFFVILKQPGNGKTDQGILVTNQDACALASSVSSPVKSKGKICLPADCTVGGITVTLDNNSMWNEFYHRSTEMILTKQGRRMFPYCRYWITGLDSNLKYILVMDISPVDNHRYKWNGRWWEPSGKAEPHVLGRVFIHPESPSTGHYWMHQPVSFYKLKLTNNTLDQEGHIILHSMHRYLPRLHLVPAEKAVEVIQLNGPGVHTFTFPQTEFFAVTAYQNIQITQLKIDYNPFAKGFRDDGLNNKPQRDGKQKNSSDQEGNNISSSSGHRVRLTEGQGSEIQPGDLDPLSRGHETSGKGLEKTSLNIKRDFLGFMDTDSALSEVPQLKQEISECLIASSFEDDSRVASPLDQNGSFNVVIKEEPLDDYDYELGECPEGVTVKQEETDEETDVYSNSDDDPILEKQLKRHNKVDNPEADHLSSKWLPSSPSGVAKAKMFKLDTGKMPVVYLEPCAVTRSTVKISELPDNMLSTSRKDKSSMLAELEYLPTYIENSNETAFCLGKESENGLRKHSPDLRVVQKYPLLKEPQWKYPDISDSISTERILDDSKDSVGDSLSGKEDLGRKRTTMLKIATAAKVVNANQNASPNVPGKRGRPRKLKLCKAGRPPKNTGKSLISTKNTPVSPGSTFPDVKPDLEDVDGVLFVSFESKEALDIHAVDGTTEESSSLQASTTNDSGYRARISQLEKELIEDLKTLRHKQVIHPGLQEVGLKLNSVDPTMSIDLKYLGVQLPLAPATSFPFWNLTGTNPASPDAGFPFVSRTGKTNDFTKIKGWRGKFHSASASRNEGGNSESSLKNRSAFCSDKLDEYLENEGKLMETSMGFSSNAPTSPVVYQLPTKSTSYVRTLDSVLKKQSTISPSTSYSLKPHSVPPVSRKAKSQNRQATFSGRTKSSYKSILPYPVSPKQKYSHVILGDKVTKNSSGIISENQANNFVVPTLDENIFPKQISLRQAQQQQQQQQGSRPPGLSKSQVKLMDLEDCALWEGKPRTYITEERADVSLTTLLTAQASLKTKPIHTIIRKRAPPCNNDFCRLGCVCSSLALEKRQPAHCRRPDCMFGCTCLKRK

SEQ ID NO: 55 - protein, 83 aa, Homo sapiens
  misc_feature (1)..(1): Xaa can be any naturally occurring amino acid
XDQEGNNISSSSGHRVRLTEGQGSEIQPGDLDPLSRGHETSGKGLEKTSLNIKRDFLGFMDTDSALSEVPQLKQEISEWYSFA

SEQ ID NO: 56 - protein, 706 aa, Homo sapiens
MNESKPGDSQNLACVFCRKHDDCPNKYGEKKTKEKWNLTVHYYCLLMSSGIWQRGKEEEGVYGFLIEDIRKEVNRASKLKCCVCKKNGASIGCVAPRCKRSYHFPCGLQRECIFQFTGNFASFCWDHRPVQIITSNNYRESLPCTICLEFIEPIPSYNILRSPCCKNAWFHRDCLQVQAINAGVFFFRCTICNNSDIFQKEMLRMGIHIPEKDASWELEENAYQELLQHYERCDVRRCRCKEGRDYNAPDSKWEIKRCQCCGSSGTHLACSSLRSWEQNWECLECRGIIYNSGEFQKAKKHVLPNSNNVGITDCLLEESSPKLPRQSPGSQSKDLLRQGSKFRRNVSTLLIELGFQIKKKTKRLYINKANIWNSALDAFRNRNFNPSYAIEVAYVIENDNFGSEHPGSKQEFLSLLMQHLENSSLFEGSLSKNLSLNSQALKENLYYEAGKMLAISLVHGGPSPGFFSKTLFNCLVYGPENTQPILDDVSDFDVAQIIIRINTATTVADLKSIINECYNYLELIGCLRLITTLSDKYMLVKDILGYHVIQRVHTPFESFKQGLKTLGVLEKIQAYPEAFCSILCHKPESLSAKILSELFTVHTLPDVKALGFWNSYLQAVEDGKSTTTMEDILIFATGCSSIPPAGFKPTPSIECLHVDFPVGNKCNNCLAIPITNTYKEFQENMDFTIRNTLRLEKEESSHYIGH

SEQ ID NO: 57 - protein, 660 aa, Homo sapiens
MSSGIWQRGKEEEGVYGFLIEDIRKEVNRASKLKCCVCKKNGASIGCVAPRCKRSYHFPCGLQRECIFQFTGNFASFCWDHRPVQIITSNNYRESLPCTICLEFIEPIPSYNILRSPCCKNAWFHRDCLQVQAINAGVFFFRCTICNNSDIFQKEMLRMGIHIPEKDASWELEENAYQELLQHYERCDVRRCRCKEGRDYNAPDSKWEIKRCQCCGSSGTHLACSSLRSWEQNWECLECRGIIYNSGEFQKAKKHVLPNSNNVGITDCLLEESSPKLPRQSPGSQSKDLLRQGSKFRRNVSTLLIELGFQIKKKTKRLYINKANIWNSALDAFRNRNFNPSYAIEVAYVIENDNFGSEHPGSKQEFLSLLMQHLENSSLFEGSLSKNLSLNSQALKENLYYEAGKMLAISLVHGGPSPGFFSKTLFNCLVYGPENTQPILDDVSDFDVAQIIIRINTATTVADLKSIINECYNYLELIGCLRLITTLSDKYMLVKDILGYHVIQRVHTPFESFKQGLKTLGVLEKIQAYPEAFCSILCHKPESLSAKILSELFTVHTLPDVKALGFWNSYLQAVEDGKSTTTMEDILIFATGCSSIPPAGFKPTPSIECLHVDFPVGNKCNNCLAIPITNTYKEFQENMDFTIRNTLRLEKEESSHYIGH

SEQ ID NO: 58 - protein, 176 aa, Homo sapiens
MNESKPGDSQNLACVFCRKHDDCPNKYGEKKTKEKWNLTVHYYCLLMSSGIWQRGKEEEGVYGFLIEDIRKEVNRASKLKCCVCKKNGASIGCVAPRCKRSYHFPCGLQRECIFQFTGNFASFCWDHRPVQIITSNNYRESLPCTICLEFIEPIPSYNILRSPCCKNAWFHRDCLQ

SEQ ID NO: 59 - protein, 101 aa, Homo sapiens
  misc_feature (1)..(1): Xaa can be any naturally occurring amino acid
XCRCKEGRDYNAPDSKWEIKRCQCCGSSGTHLACSSLRSWEQNWECLECRGIIYNSGEFQKAKKHVLPNSNNVGITDCLLEESSPKLPRQSPGSQSKDLLR

SEQ ID NO: 60 - protein, 351 aa, Homo sapiens
MNESKPGDSQNLACVFCRKHDDCPNKYGEKKTKEKWNLTVHYYCLLMSSGIWQRGKEEEGVYGFLIEDIRKEVNRASKLKCCVCKKNGASIGCVAPRCKRSYHFPCGLQRECIFQFTGNFASFCWDHRPVQIITSNNYRESLPCTICLEFIEPIPSYNILRSPCCKNAWFHRDCLQVQAINAGVFFFRCTICNNSDIFQKEMLRMGIHIPEKDASWELEENAYQELLQHYERCDVRRCRCKEGRDYNAPDSKWEIKRCQCCGSSGTHLACSSLRSWEQNWECLECRGIIYNSGEFQKAKKHVLPNSNNVGITDCLLEESSPKLPRQSPGSQSKDLLRNKVSLCYPGWSTVA

SEQ ID NO: 61 - protein, 121 aa, Homo sapiens
MNESKPGDSQNLACVFCRKHDDCPNKYGEKKTKEKWNLTVHYYCLLMSSGIWQRGKEEEGVYGFLIEDIRKEVNRASKLKCCVCKKNGASIGCVAPRCKRSYHFPCGLQRECIFQFTGNFA

SEQ ID NO: 62 - protein, 736 aa, Homo sapiens
MLIPALQISDSESVGLEDGIEQSAYLTESKMNESKPGDSQNLACVFCRKHDDCPNKYGEKKTKEKWNLTVHYYCLLMSSGIWQRGKEEEGVYGFLIEDIRKEVNRASKLKCCVCKKNGASIGCVAPRCKRSYHFPCGLQRECIFQFTGNFASFCWDHRPVQIITSNNYRESLPCTICLEFIEPIPSYNILRSPCCKNAWFHRDCLQVQAINAGVFFFRCTICNNSDIFQKEMLRMGIHIPEKDASWELEENAYQELLQHYERCDVRRCRCKEGRDYNAPDSKWEIKRCQCCGSSGTHLACSSLRSWEQNWECLECRGIIYNSGEFQKAKKHVLPNSNNVGITDCLLEESSPKLPRQSPGSQSKDLLRQGSKFRRNVSTLLIELGFQIKKKTKRLYINKANIWNSALDAFRNRNFNPSYAIEVAYVIENDNFGSEHPGSKQEFLSLLMQHLENSSLFEGSLSKNLSLNSQALKENLYYEAGKMLAISLVHGGPSPGFFSKTLFNCLVYGPENTQPILDDVSDFDVAQIIIRINTATTVADLKSIINECYNYLELIGCLRLITTLSDKYMLVKDILGYHVIQRVHTPFESFKQGLKTLGVLEKIQAYPEAFCSILCHKPESLSAKILSELFTVHTLPDVKALGFWNSYLQAVEDGKSTTTMEDILIFATGCSSIPPAGFKPTPSIECLHVDFPVGNKCNNCLAIPITNTYKEFQENMDFTIRNTLRLEKEESSHYIGH

SEQ ID NO: 63 - protein, 131 aa, Homo sapiens
MNESKPGDSQNLACVFCRKHDDCPNKYGEKKTKEKWNLTVHYYCLLMSSGIWQRGKEEEGVYGFLIEDIRKEVNRASKLKCCVCKKNGASIGCVAPRCKRSYHFPCGLQRECIFQFTGNFASFCWDHRPVQ

SEQ ID NO: 64 - protein, 79 aa, Homo sapiens
MNESKPGDSQNLACVFCRKHDDCPNKYGEKKTKEKWNLTVHYYCLLMSSGIWQRGKEEEGVYGFLIEDIRKEVNRASKL

SEQ ID NO: 65 - protein, 123 aa, Homo sapiens
  misc_feature (1)..(1): Xaa can be any naturally occurring amino acid
XEVLVVRTLGFIETVYSKWEIKRCQCCGSSGTHLACSSLRSWEQNWECLECRGIIYNSGEFQKAKKHVLPNSNNVGITDCLLEESSPKLPRQSPGSQSKDLLRQGSKFRRNVSTLLIELGFQI

SEQ ID NO: 66 - protein, 444 aa, Homo sapiens
MKFPASVLASVFLFVAETTAALSLSSTYRSGGDRMWQALTLLFSLLPCALVQLTLLFVHRDLSRDRPLVLLLHLLQLGPLFRCFEVFCIYFQSGNNEEPYVSITKKRQMPKNGLSEEIEKEVGQAEGKLITHRSAFSRASVIQAFLGSAPQLTLQLYISVMQQDVTVGRSLLMTISLLSIVYGALRCNILAIKIKYDEYEVKVKPLAYVCIFLWRSFEIATRVVVLVLFTSVLKTWVVVIILINFFSFFLYPWILFWCSGSPFPENIEKALSRVGTTIVLCFLTLLYTGINMFCWSAVQLKIDSPDLISKSHNWYQLLVYYMIRFIENAILLLLWYLFKTDIYMYVCAPLLVLQLLIGYCTAILFMLVFYQFFHPCKKLFSSSVSEGFQRWLRCFCWACRQQKPCEPIGKEDLQSSRDRDETPSSSKTSPEPGQFLNAEDLCSA

SEQ ID NO: 67 - protein, 445 aa, Homo sapiens
MLCYVTRPDAVLMEVEVEAKANGEDCLNQVCRRLGIIEVDYFGLQFTGSKGESLWLNLRNRISQQMDGLAPYRLKLRVKFFVEPHLILQEQTRHIFFLHIKEALLAGHLLCSPEQAVELSALLAQTKFGDYNQNTAKYNYEELCAKELSSATLNSIVAKHKELEGTSQASAEYQVLQIVSAMENYGIEWHSVRDSEGQKLLIGVGPEGISICKDDFSPINRIAYPVVQMATQSGKNVYLTVTKESGNSIVLLFKMISTRAASGLYRAITETHAFYRCDTVTSAVMMQYSRDLKGHLASLFLNENINLGKKYVFDIKRTSKEVYDHARRALYNAGVVDLVSRNNQSPSHSPLKSSESSMNCSSCEGLSCQQTRVLQEKLRKLKEAMLCMVCCEEEINSTFCPCGHTVCCESCAAQLQSCPVCRSRVEHVQHVYLPTHTSLLNLTVI

SEQ ID NO: 68 - protein, 264 aa, Homo sapiens
MENYGIEWHSVRDSEGQKLLIGVGPEGISICKDDFSPINRIAYPVVQMATQSGKNVYLTVTKESGNSIVLLFKMISTRAASGLYRAITETHAFYRCDTVTSAVMMQYSRDLKGHLASLFLNENINLGKKYVFDIKRTSKEVYDHARRALYNAGVVDLVSRNNQSPSHSPLKSSESSMNCSSCEGLSCQQTRVLQEKLRKLKEAMLCMVCCEEEINSTFCPCGHTVCCESCAAQLQSCPVCRSRVEHVQHVYLPTHTSLLNLTVI

SEQ ID NO: 69 - protein, 749 aa, Homo sapiens
MALPLLPGNSFNRNVGKEKFHKSQHWGFCNNVMMLVSDEKPGIGGEPLLGQKIKPKCSIYPKGDGSDVPSWVAFDKQVLSFDAYLEEEVLDKSQTNYRIRYYKIYFYPEDDTIQVNEPEVKNSGLLQGTSIRRHRITLPPPDEDQFYTVYHFNVGTEVVFYGRTFKIYDCDAFTRNFLRKIGVKVNPPVQCPEDPYMKIRREVVEHVEPLRPYESLDTLKQFLQYHGKILCFFCLWDDSVSMFGDRRELILHYFLCDDTIEIKELLPHSSGRDALKMFLRRSKLPKNCPPRVYQPGQITDRAVLNSYGDFIKNQADGYLFDRYKLGKVDQEFYKDSDLSLGVTINVWGRKVLLYDCDEFTKSYYKSKYGIENFTSVSCKPPSPPPKIERKFPPYNGFGSEEDSLRNCIDLKPTPHRRNFKKFMEKDSYGSKSNILRFFAKLVTDKCVDLDRMFVISYYLGDDTISVFEPIERNSGIAGGMFLKRSRVKKPGQEVFKSELSEYIKAEELYIGVTVNVNGYLFRLLNADEYTLNYMEQNTDKYPFSNLKLALQKLKQEEGKSRELKQVFKAADSKHTNMVDYNTFRDILMSLTVGNLAEQEFVTIARHYRVPEGTCSDMDFLIALAHEKFKKNMFENFDTFIYSCVYEDREKKNVLPTKDIKRLCKSSRLPLSDDLLESLLSRFEDSEKQIDYKSFFSALNWRKNPVPELQPASYLKERCEDVWLGMPSPIPAKYIDYWTFLKDAFGLEEE

SEQ ID NO: 70 - protein, 327 aa, Homo sapiens
MGRTSKDKRDVYYRLAKENGWRARSAFKLLQLDKEFQLFQGVTRAVDLCAAPGSWSQVLSQKIGGQGSGHVVAVDLQAMAPLPGVVQIQGDITQLSTAKEIIQHFKGCPADLVVCDGAPDVTGLHDVDEYMQAQLLLAALNIATHVLKPGGCFVAKIFRGRDVTLLYSQLQVFFSSVLCAKPRSSRNSSIEAFAVCQGYDPPEGFIPDLSKPLLDHSYDFNQLDGPTRIIVPFVTCGDLSSYDSDRSYPLDLEGGSEYKYTPPTQPPISPPYQEACTLKRKGQLAKEIRPQDCPISRVDTFPQPLAAPQCHTLLAPEMEDNEMSCSP

SEQ ID NO: 71 - protein, 329 aa, Homo sapiens
MGRTSKDKRDVYYRLAKENGWRARSAFKLLQLDKEFQLFQGVTRAVDLCAAPGSWSQVLSQKIGGQGSGHVVAVDLQAMAPLPGVVQIQGDITQLSTAKEIIQHFKGCPADLVVCDGAPDVTGLHDVDEYMQAQLLLAALNIATHVLKPGGCFVAKIFRGRDVTLLYSQLQVFFSSVLCAKPRSSRNSSIEAFAVCQGYDPPEGFIPDLSKPLLDHSYDPDFNQLDGPTRIIVPFVTCGDLSSYDSDRSYPLDLEGGSEYKYTPPTQPPISPPYQEACTLKRKGQLAKEIRPQDCPISRVDTFPQPLAAPQCHTLLAPEMEDNEMSCSP

SEQ ID NO: 72 - protein, 192 aa, Homo sapiens
MALNIATHVLKPGGCFVAKIFRGRDVTLLYSQLQVFFSSVLCAKPRSSRNSSIEAFAVCQGYDPPEGFIPDLSKPLLDHSYDPDFNQLDGPTRIIVPFVTCGDLSSYDSDRSYPLDLEGGSEYKYTPPTQPPISPPYQEACTLKRKGQLAKEIRPQDCPISRVDTFPQPLAAPQCHTLLAPEMEDNEMSCSP

SEQ ID NO: 73 - protein, 334 aa, Homo sapiens
MKMASSLAFLLLNFHVSLLLVQLLTPCSAQFSVLGPSGPILAMVGEDADLPCHLFPTMSAETMELKWVSSSLRQVVNVYADGKEVEDRQSAPYRGRTSILRDGITAGKAALRIHNVTASDSGKYLCYFQDGDFYEKALVELKVAALGSNLHVEVKGYEDGGIHLECRSTGWYPQPQIQWSNAKGENIPAVEAPVVADGVGLYEVAASVIMRGGSGEGVSCIIRNSLLGLEKTASISIADPFFRSAQPWIAALAGTLPILLLLLAGASYFLWRQQKEITALSSEIESEQEMKEMGYAATEREISLRESLQEELKRKKIQYLTRGEESSSDTNKSA

SEQ ID NO: 74 - protein, 311 aa, Homo sapiens
MGIPRAQFSVLGPSGPILAMVGEDADLPCHLFPTMSAETMELKWVSSSLRQVVNVYADGKEVEDRQSAPYRGRTSILRDGITAGKAALRIHNVTASDSGKYLCYFQDGDFYEKALVELKVAALGSNLHVEVKGYEDGGIHLECRSTGWYPQPQIQWSNAKGENIPAVEAPVVADGVGLYEVAASVIMRGGSGEGVSCIIRNSLLGLEKTASISIADPFFRSAQPWIAALAGTLPILLLLLAGASYFLWRQQKEITALSSEIESEQEMKEMGYAATEREISLRESLQEELKRKKIQYLTRGEESSSDTNKSA

SEQ ID NO: 75 - protein, 196 aa, Homo sapiens
MVGEDADLPCHLFPTMSAETMELKWVSSSLRQVVNVYADGKEVEDRQSAPYRGRTSILRDGITAGKAALRIHNVTASDSGKYLCYFQDGDFYEKALVELKVAALGSNLHVEVKGYEDGGIHLECRSTGWYPQPQIQWSNAKGENIPAVEAPVVADGVGLYEVAASVIMRGGSGEGVSCIIRNSLLGLEKTASISIA

SEQ ID NO: 76 - protein, 115 aa, Homo sapiens
MVGEDADLPCHLFPTMSAETMELKWVSSSLRQVVNVYADGKEVEDRQSAPYRGRTSILRDGITAGKAALRIHNVTASDSGKYLCYFQDGDFYEKALVELKVAALGSNLHVEVKGY

SEQ ID NO: 77 - protein, 115 aa, Homo sapiens
RGGSGEGVSCIIRNSLLGLEKTASISIADPFFRSAQPWIAALAGTLPILLLLLAGASYFLWRQQKEITALSSEIESEQEMKEMGYAATEREISLRESLQEELKRKKIQYLTREWL

SEQ ID NO: 78 - protein, 160 aa, Homo sapiens
MKMASSLAFLLLNFHVSLLLVQLLTPCSAQFSVLGPSGPILAMVGEDADLPCHLFPTMSAETMELKWVSSSLRQVVNVYADGKEVEDRQSAPYRGRTSILRDGITAGKAALRIHNVTASDSGKYLCYFQDGDFYEKALVELKVADPFFRSAQPWIAALAG

SEQ ID NO: 79 - protein, 43 aa, Homo sapiens
MKMASSLAFLLLNFHVSLLLVQLLTPCSGLCSPLGSLYLAFPV

SEQ ID NO: 80 - protein, 292 aa, Homo sapiens
MVGEDADLPCHLFPTMSAETMELKWVSSSLRQVVNVYADGKEVEDRQSAPYRGRTSILRDGITAGKAALRIHNVTASDSGKYLCYFQDGDFYEKALVELKVAALGSNLHVEVKGYEDGGIHLECRSTGWYPQPQIQWSNAKGENIPAVEAPVVADGVGLYEVAASVIMRGGSGEGVSCIIRNSLLGLEKTASISIADPFFRSAQPWIAALAGTLPILLLLLAGASYFLWRQQKEITALSSEIESEQEMKEMGYAATEREISLRESLQEELKRKKIQYLTRGEESSSDTNKSA

SEQ ID NO: 81 - protein, 513 aa, Homo sapiens
MKMASFLAFLLLNFRVCLLLLQLLMPHSAQFSVLGPSGPILAMVGEDADLPCHLFPTMSAETMELKWVSSSLRQVVNVYADGKEVEDRQSAPYRGRTSILRDGITAGKAALRIHNVTASDSGKYLCYFQDGDFYEKALVELKVAALGSDLHVDVKGYKDGGIHLECRSTGWYPQPQIQWSNNKGENIPTVEAPVVADGVGLYAVAASVIMRGSSGEGVSCTIRSSLLGLEKTASISIADPFFRSAQRWIAALAGTLPVLLLLLGGAGYFLWQQQEEKKTQFRKKKREQELREMAWSTMKQEQSTRVKLLEELRWRSIQYASRGERHSAYNEWKKALFKPADVILDPKTANPILLVSEDQRSVQRAKEPQDLPDNPERFNWHYCVLGCESFISGRHYWEVEVGDRKEWHIGVCSKNVQRKGWVKMTPENGFWTMGLTDGNKYRTLTEPRTNLKLPKPPKKVGVFLDYETGDISFYNAVDGSHIHTFLDVSFSEALYPVFRILTLEPTALTICPA

SEQ ID NO: 82 - protein, 43 aa, Homo sapiens
MKMASFLAFLLLNFRVCLLLLQLLMPHSAQFSVLGPSGPILAM

SEQ ID NO: 83 - protein, 352 aa, Homo sapiens
MKMASFLAFLLLNFRVCLLLLQLLMPHSAQFSVLGPSGPILAMVGEDADLPCHLFPTMSAETMELKWVSSSLRQVVNVYADGKEVEDRQSAPYRGRTSILRDGITAGKAALRIHNVTASDSGKYLCYFQDGDFYEKALVELKVAALGSDLHVDVKGYKDGGIHLECRSTGWYPQPQIQWSNNKGENIPTVEAPVVADGVGLYAVAASVIMRGSSGEGVSCTIRSSLLGLEKTASISIADPFFRSAQRWIAALAGTLPVLLLLLGGAGYFLWQQQEEKKTQFRKKKREQELREMAWSTMKQEQSTRVKLLEELRWRSIQYASRGERHSAYNEWKKALFKPGEEMLQMRLHFVK

SEQ ID NO: 84 - protein, 119 aa, Homo sapiens
MKMASFLAFLLLNFRVCLLLLQLLMPHSAQFSVLGPSGPILAMVGEDADLPCHLFPTMSAETMELKWVSSSLRQVVNVYADGKEVEDRQSAPYRGRTSILRDGITAGKAALRIHNVTAS

SEQ ID NO: 85 - protein, 461 aa, Homo sapiens
MKMASFLAFLLLNFRVCLLLLQLLMPHSAQFSVLGPSGPILAMVGEDADLPCHLFPTMSAETMELKWVSSSLRQVVNVYADGKEVEDRQSAPYRGRTSILRDGITAGKAALRIHNVTASDSGKYLCYFQDGDFYEKALVELKVADGVGLYAVAASVIMRGSSGEGVSCTIRSSLLGLEKTASISIADPFFRSAQRWIAALAGTLPVLLLLLGGAGYFLWQQQEEKKTQFRKKKREQELREMAWSTMKQEQSTRVKLLEELRWRSIQYASRGERHSAYNEWKKALFKPADVILDPKTANPILLVSEDQRSVQRAKEPQDLPDNPERFNWHYCVLGCESFISGRHYWEVEVGDRKEWHIGVCSKNVQRKGWVKMTPENGFWTMGLTDGNKYRTLTEPRTNLKLPKPPKKVGVFLDYETGDISFYNAVDGSHIHTFLDVSFSEALYPVFRILTLEPTALTICPA

SEQ ID NO: 86 - protein, 378 aa, Homo sapiens
MKMASFLAFLLLNFRVCLLLLQLLMPHSAQFSVLGPSGPILAMVGEDADLPCHLFPTMSAETMELKWVSSSLRQVVNVYADGKEVEDRQSAPYRGRTSILRDGITAGKAALRIHNVTASDSGKYLCYFQDGDFYEKALVELKVAALGSDLHVDVKGYKDGGIHLECRSTGWYPQPQIQWSNNKGENIPTVEAPVVADGVGLYAVAASVIMRGSSGEGVSCTIRSSLLGLEKTASISIADPFFRSAQRWIAALAGTLPVLLLLLGGAGYFLWQQQEEKKTQFRKKKREQELREMAWSTMKQEQSTRVKLLEELRWRSIQYASRGERHSAYNEWKKALFKPGPPIGQTQQQTRGQGSPVALSQESAQRTDSWGPEEGGES

SEQ ID NO: 87 - protein, 92 aa, Homo sapiens
MKMASFLAFLLLNFRVCLLLLQLLMPHSAQFSVLGPSGPILAMVGEDADLPCHLFPTMSAETMELKWVSSSLRQVVNVYADGKEVEDRQSAP

SEQ ID NO: 88 - protein, 527 aa, Homo sapiens
MESAAALHFSRPASLLLLLLSLCALVSAQFIVVGPTDPILATVGENTTLRCHLSPEKNAEDMEVRWFRSQFSPAVFVYKGGRERTEEQMEEYRGRTTFVSKDISRGSVALVIHNITAQENGTYRCYFQEGRSYDEAILHLVVAGLGSKPLISMRGHEDGGIRLECISRGWYPKPLTVWRDPYGGVAPALKEVSMPDADGLFMVTTAVIIRDKSVRNMSCSINNTLLGQKKESVIFIPESFMPSVSPCAVALPIIVVILMIPIAVCIYWINKLQKEKKILSGEKEFERETREIALKELEKERVQKEEELQVKEKLQEELRWRRTFLHAVDVVLDPDTAHPDLFLSEDRRSVRRCPFRHLGESVPDNPERFDSQPCVLGRESFASGKHYWEVEVENVIEWTVGVCRDSVERKGEVLLIPQNGFWTLEMHKGQYRAVSSPDRILPLKESLCRVGVFLDYEAGDVSFYNMRDRSHIYTCPRSAFSVPVRPFFRLGCEDSPIFICPALTGANGVTVPEEGLTLHRVGTHQSL

SEQ ID NO: 89 - protein, 151 aa, Homo sapiens
MESAAALHFSRPASLLLLLLSLCALVSAQFIVVGPTDPILATVGENTTLRCHLSPEKNAEDMEVRWFRSQFSPAVFVYKGGRERTEEQMEEYRGRTTFVSKDISRGSVALVIHNITAQENGTYRCYFQEGRSYDEAILHLVVAELLEAEVY

SEQ ID NO: 90 - protein, 330 aa, Homo sapiens
MESAAALHFSRPASLLLLLLSLCALVSAQFIVVGPTDPILATVGENTTLRCHLSPEKNAEDMEVRWFRSQFSPAVFVYKGGRERTEEQMEEYRGRTTFVSKDISRGSVALVIHNITAQENGTYRCYFQEGRSYDEAILHLVVAGLGSKPLISMRGHEDGGIRLECISRGWYPKPLTVWRDPYGGVAPALKEVSMPDADGLFMVTTAVIIRDKSVRNMSCSINNTLLGQKKESVIFIPESFMPSVSPCAVALPIIVVILMIPIAVCIYWINKLQKEKKILSGEKEFERETREIALKELEKERVQKEEELQVKEKLQEELRWRRTFLHAGPV

SEQ ID NO: 91 - protein, 78 aa, Homo sapiens
  misc_feature (1)..(1): Xaa can be any naturally occurring amino acid
XIIVVILMIPIAVCIYWINKLQKEKKILSGEKEFERETREIALKELEKERVQKEEELQVKEKLQEELRWRRTFLHAGW

SEQ ID NO: 92 - protein, 86 aa, Homo sapiens
MEVRWFRSQFSPAVFVYKGGRERTEEQMEEYRGRTTFVSKDISRGSVALVIHNITAQENGTYRCYFQEGRSYDEAILHLVVAGLGS

SEQ ID NO: 93 - protein, 334 aa, Homo sapiens
MESAAALHFSRPASLLLLLLSLCALVSAQFIVVGPTDPILATVGENTTLRCHLSPEKNAEDMEVRWFRSQFSPAVFVYKGGRERTEEQMEEYRGRTTFVSKDISRGSVALVIHNITAQENGTYRCYFQEGRSYDEAILHLVVAGLGSKPLISMRGHEDGGIRLECISRGWYPKPLTVWRDPYGGVAPALKEVSMPDADGLFMVTTAVIIRDKSVRNMSCSINNTLLGQKKESVIFIPESFMPSVSPCAVALPIIVVILMIPIAVCIYWINKLQKEKKILSGEKEFERETREIALKELEKERVQKEEELQVKEKLQEELRWRRTFLHAELQFFSN

SEQ ID NO: 94 - protein, 466 aa, Homo sapiens
MEVRWFRSQFSPAVFVYKGGRERTEEQMEEYRGRTTFVSKDISRGSVALVIHNITAQENGTYRCYFQEGRSYDEAILHLVVAGLGSKPLISMRGHEDGGIRLECISRGWYPKPLTVWRDPYGGVAPALKEVSMPDADGLFMVTTAVIIRDKSVRNMSCSINNTLLGQKKESVIFIPESFMPSVSPCAVALPIIVVILMIPIAVCIYWINKLQKEKKILSGEKEFERETREIALKELEKERVQKEEELQVKEKLQEELRWRRTFLHAVDVVLDPDTAHPDLFLSEDRRSVRRCPFRHLGESVPDNPERFDSQPCVLGRESFASGKHYWEVEVENVIEWTVGVCRDSVERKGEVLLIPQNGFWTLEMHKGQYRAVSSPDRILPLKESLCRVGVFLDYEAGDVSFYNMRDRSHIYTCPRSAFSVPVRPFFRLGCEDSPIFICPALTGANGVTVPEEGLTLHRVGTHQSL

SEQ ID NO: 95 - protein, 241 aa, Homo sapiens
MKEVVYWSPKKVADWLLENAMPEYCEPLEHFTGQDLINLTQEDFKKPPLCRVSSDNGQRLLDMIETLKMEHHLEAHKNGHANGHLNIGVDIPTPDGSFSIKIKPNGMPNGYRKEMIKIPMPELERSQYPMEWGKTFLAFLYALSCFVLTTVMISVVHERVPPKEVQPPLPDTFFDHFNRVQWAFSICEINGMILVGLWLIQWLLLKYKDVGNESRVVMIFLSIVHPVLLLGSIAGFLSLSL

SEQ ID NO: 96 - protein, 413 aa, Homo sapiens
MKEVVYWSPKKVADWLLENAMPEYCEPLEHFTGQDLINLTQEDFKKPPLCRVSSDNGQRLLDMIETLKMEHHLEAHKNGHANGHLNIGVDIPTPDGSFSIKIKPNGMPNGYRKEMIKIPMPELERSQYPMEWGKTFLAFLYALSCFVLTTVMISVVHERVPPKEVQPPLPDTFFDHFNRVQWAFSICEINGMILVGLWLIQWLLLKYKSIISRRFFCIVGTLYLYRCITMYVTTLPVPGMHFNCSPKLFGDWEAQLRRIMKLIAGGGLSITGSHNMCGDYLYSGHTVMLTLTYLFIKEYSPRRLWWYHWICWLLSVVGIFCILLAHDHYTVDVVVAYYITTRLFWWYHTMANQQVLKEASQMNLLARVWWYRPFQYFEKNVQGIVPRSYHWPFPWPVVHLSRQVKYSRLVNDT

SEQ ID NO: 97 - protein, 219 aa, Homo sapiens
MKEVVYWSPKKVADWLLENAMPEYCEPLEHFTGQDLINLTQEDFKKPPLCRVSSDNGQRLLDMIETLKMEHHLEAHKNGHANGHLNIGVDIPTPDGSFSIKIKPNGMPNGYRKEMIKIPMPELERSQYPMEWGKTFLAFLYALSCFVLTTVMISVVHERVPPKEVQPPLPDTFFDHFNRVQWAFSICEINGMILVGLWLIQWLLLKYNFSETGKPNCEE

SEQ ID NO: 98 - protein, 12 aa, Homo sapiens
LWLIQWLLLKYK

SEQ ID NO: 99 - protein, 36 aa, Homo sapiens
MYVTTLPVPGMHFNCSPKLFGDWEAQLRRIMKLIAG

SEQ ID NO: 100 - protein, 628 aa, Homo sapiens
MDSGSSSSDSAPDCWDQVDMESPGSAPSGDGVSSAVAEAQREPLSSAFSRKLNVNAKPFVPNVHAAEFVPSFLRGPTQPPTLPAGSGSNDETCTGAGYPQGKRMGRGAPVEPSREEPLVSLEGSNSAVTMELSEPVVENGEVEMALEESWEHSKEVSEAEPGGGSSGDSGPPEESGQEMMEEKEEIRKSKSVIVPSGAPKKEHVNVVFIGHVDAGKSTIGGQIMFLTGMVDKRTLEKYEREAKEKNRETWYLSWALDTNQEERDKGKTVEVGRAYFETERKHFTILDAPGHKSFVPNMIGGASQADLAVLVISARKGEFETGFEKGGQTREHAMLAKTAGVKHLIVLINKMDDPTVNWSIERYEECKEKLVPFLKKVGFSPKKDIHFMPCSGLTGANIKEQSDFCPWYTGLPFIPYLDNLPNFNRSIDGPIRLPIVDKYKDMGTVVLGKLESGSIFKGQQLVMMPNKHNVEVLGILSDDTETDFVAPGENLKIRLKGIEEEEILPGFILCDPSNLCHSGRTFDVQIVIIEHKSIICPGYNAVLHIHTCIEEVEITALISLVDKKSGEKSKTRPRFVKQDQVCIARLRTAGTICLETFKDFPQMGRFTLRDEGKTIAIGKVLKLVPEKD

SEQ ID NO: 101 - protein, 2442 aa, Homo sapiens
MAENLLDGPPNPKRAKLSSPGFSANDSTDFGSLFDLENDLPDELIPNGGELGLLNSGNLVPDAASKHKQLSELLRGGSGSSINPGIGNVSASSPVQQGLGGQAQGQPNSANMASLSAMGKSPLSQGDSSAPSLPKQAASTSGPTPAASQALNPQAQKQVGLATSSPATSQTGPGICMNANFNQTHPGLLNSNSGHSLINQASQGQAQVMNGSLGAAGRGRGAGMPYPTPAMQGASSSVLAETLTQVSPQMTGHAGLNTAQAGGMAKMGITGNTSPFGQPFSQAGGQPMGATGVNPQLASKQSMVNSLPTFPTDIKNTSVTNVPNMSQMQTSVGIVPTQAIATGPTADPEKRKLIQQQLVLLLHAHKCQRREQANGEVRACSLPHCRTMKNVLNHMTHCQAGKACQVAHCASSRQIISHWKNCTRHDCPVCLPLKNASDKRNQQTILGSPASGIQNTIGSVGTGQQNATSLSNPNPIDPSSMQRAYAALGLPYMNQPQTQLQPQVPGQQPAQPQTHQQMRTLNPLGNNPMNIPAGGITTDQQPPNLISESALPTSLGATNPLMNDGSNSGNIGTLSTIPTAAPPSSTGVRKGWHEHVTQDLRSHLVHKLVQAIFPTPDPAALKDRRMENLVAYAKKVEGDMYESANSRDEYYHLLAEKIYKIQKELEEKRRSRLHKQGILGNQPALPAPGAQPPVIPQAQPVRPPNGPLSLPVNRMQVSQGMNSFNPMSLGNVQLPQAPMGPRAASPMNHSVQMNSMGSVPGMAISPSRMPQPPNMMGAHTNNMMAQAPAQSQFLPQNQFPSSSGAMSVGMGQPPAQTGVSQGQVPGAALPNPLNMLGPQASQLPCPPVTQSPLHPTPPPASTAAGMPSLQHTTPPGMTPPQPAAPTQPSTPVSSSGQTPTPTPGSVPSATQTQSTPTVQAAAQAQVTPQPQTPVQPPSVATPQSSQQQPTPVHAQPPGTPLSQAAASIDNRVPTPSSVASAETNSQQPGPDVPVLEMKTETQAEDTEPDPGESKGEPRSEMMEEDLQGASQVKEETDIAEQKSEPMEVDEKKPEVKVEVKEEEESSSNGTASQSTSPSQPRKKIFKPEELRQALMPTLEALYRQDPESLPFRQPVDPQLLGIPDYFDIVKNPMDLSTIKRKLDTGQYQEPWQYVDDVWLMFNNAWLYNRKTSRVYKFCSKLAEVFEQEIDPVMQSLGYCCGRKYEFSPQTLCCYGKQLCTIPRDAAYYSYQNRYHFCEKCFTEIQGENVTLGDDPSQPQTTISKDQFEKKKNDTLDPEPFVDCKECGRKMHQICVLHYDIIWPSGFVCDNCLKKTGRPRKENKFSAKRLQTTRLGNHLEDRVNKFLRRQNHPEAGEVFVRVVASSDKTVEVKPGMKSRFVDSGEMSESFPYRTKALFAFEEIDGVDVCFFGMHVQEYGSDCPPPNTRRVYISYLDSIHFFRPRCLRTAVYHEILIGYLEYVKKLGYVTGHIWACPPSEGDDYIFHCHPPDQKIPKPKRLQEWYKKMLDKAFAERIIHDYKDIFKQATEDRLTSAKELPYFEGDFWPNVLEESIKELEQEEEERKKEESTAASETTEGSQGDSKNAKKKNNKKTNKNKSSISRANKKKPSMPNVSNDLSQKLYATMEKHKEVFFVIHLHAGPVINTLPPIVDPDPLLSCDLMDGRDAFLTLARDKHWEFSSLRRSKWSTLCMLVELHTQGQDRFVYTCNECKHHVETRWHCTVCEDYDLCINCYNTKSHAHKMVKWGLGLDDEGSSQGEPQSKSPQESRRLSIQRCIQSLVHACQCRNANCSLPSCQKMKRVVQHTKGCKRKTNGGCPVCKQLIALCCYHAKHCQENKCPVPFCLNIKHKLRQQQIQHRLQQAQLMRRRMATMNTRNVPQQSLPSPTSAPPGTPTQQPSTPQTPQPPAQPQPSPVSMSPAGFPSVARTQPPTTVSTGKPTSQVPAPPPPAQPPPAAVEAARQIEREAQQQQHLYRVNINNSMPPGRTGMGTPGSQMAPVSLNVPRPNQVSGPVMPSMPPGQWQQAPLPQQQPMPGLPRPVISMQAQAAVAGPRMPSVQPPRSISPSALQDLLRTLKSPSSPQQQQQVLNILKSNPQLMAAFIKQRTAKYVANQPGMQPQPGLQSQPGMQPQPGMHQQPSLQNLNAMQAGVPRPGVPPQQQAMGGLNPQGQALNIMNPGHNPNMASMNPQYREMLRRQLLQQQQQQQQQQQQQQQQQQGSAGMAGGMAGHGQFQQPQGPGGYPPAMQQQQRMQQHLPLQGSSMGQMAAQMGQLGQMGQPGLGADSTPNIQQALQQRILQQQQMKQQIGSPGQPNPMSPQQHMLSGQPQASHLPGQQIATSLSNQVRSPAPVQSPRPQSQPPHSSPSPRIQPQPSPHHVSPQTGSPHPGLAVTMASSIDQGHLGNPEQSAMLPQLNTPSRSALSSELSLVGDTTGDTLEKFVEGL

SEQ ID NO: 102 - protein, 2404 aa, Homo sapiens
MAENLLDGPPNPKRAKLSSPGFSANDSTDFGSLFDLENDLPDELIPNGGELGLLNSGNLVPDAASKHKQLSELLRGGSGSSINPGIGNVSASSPVQQGLGGQAQGQPNSANMASLSAMGKSPLSQGDSSAPSLPKQAASTSGPTPAASQALNPQAQKQVGLATSSPATSQTGPGICMNANFNQTHPGLLNSNSGHSLINQASQGQAQVMNGSLGAAGRGRGAGMPYPTPAMQGASSSVLAETLTQVSPQMTGHAGLNTAQAGGMAKMGITGNTSPFGQPFSQAGGQPMGATGVNPQLASKQSMVNSLPTFPTDIKNTSVTNVPNMSQMQTSVGIVPTQAIATGPTADPEKRKLIQQQLVLLLHAHKCQRREQANGEVRACSLPHCRTMKNVLNHMTHCQAGKACQAILGSPASGIQNTIGSVGTGQQNATSLSNPNPIDPSSMQRAYAALGLPYMNQPQTQLQPQVPGQQPAQPQTHQQMRTLNPLGNNPMNIPAGGITTDQQPPNLISESALPTSLGATNPLMNDGSNSGNIGTLSTIPTAAPPSSTGVRKGWHEHVTQDLRSHLVHKLVQAIFPTPDPAALKDRRMENLVAYAKKVEGDMYESANSRDEYYHLLAEKIYKIQKELEEKRRSRLHKQGILGNQPALPAPGAQPPVIPQAQPVRPPNGPLSLPVNRMQVSQGMNSFNPMSLGNVQLPQAPMGPRAASPMNHSVQMNSMGSVPGMAISPSRMPQPPNMMGAHTNNMMAQAPAQSQFLPQNQFPSSSGAMSVGMGQPPAQTGVSQGQVPGAALPNPLNMLGPQASQLPCPPVTQSPLHPTPPPASTAAGMPSLQHTTPPGMTPPQPAAPTQPSTPVSSSGQTPTPTPGSVPSATQTQSTPTVQAAAQAQVTPQPQTPVQPPSVATPQSSQQQPTPVHAQPPGTPLSQAAASIDNRVPTPSSVASAETNSQQPGPDVPVLEMKTETQAEDTEPDPGESKGEPRSEMMEEDLQGASQVKEETDIAEQKSEPMEVDEKKPEVKVEVKEEEESSSNGTASQSTSPSQPRKKIFKPEELRQALMPTLEALYRQDPESLPFRQPVDPQLLGIPDYFDIVKNPMDLSTIKRKLDTGQYQEPWQYVDDVWLMFNNAWLYNRKTSRVYKFCSKLAEVFEQEIDPVMQSLGYCCGRKYEFSPQTLCCYGKQLCTIPRDAAYYSYQNRYHFCEKCFTEIQGENVTLGDDPSQPQTTISKDQFEKKKNDTLDPEPFVDCKECGRKMHQICVLHYDIIWPSGFVCDNCLKKTGRPRKENKFSAKRLQTTRLGNHLEDRVNKFLRRQNHPEAGEVFVRVVASSDKTVEVKPGMKSRFVDSGEMSESFPYRTKALFAFEEIDGVDVCFFGMHVQEYGSDCPPPNTRRVYISYLDSIHFFRPRCLRTAVYHEILIGYLEYVKKLGYVTGHIWACPPSEGDDYIFHCHPPDQKIPKPKRLQEWYKKMLDKAFAERIIHDYKDIFKQATEDRLTSAKELPYFEGDFWPNVLEESIKELEQEEEERKKEESTAASETTEGSQGDSKNAKKKNNKKTNKNKSSISRANKKKPSMPNVSNDLSQKLYATMEKHKEVFFVIHLHAGPVINTLPPIVDPDPLLSCDLMDGRDAFLTLARDKHWEFSSLRRSKWSTLCMLVELHTQGQDRFVYTCNECKHHVETRWHCTVCEDYDLCINCYNTKSHAHKMVKWGLGLDDEGSSQGEPQSKSPQESRRLSIQRCIQSLVHACQCRNANCSLPSCQKMKRVVQHTKGCKRKTNGGCPVCKQLIALCCYHAKHCQENKCPVPFCLNIKHKLRQQQIQHRLQQAQLMRRRMATMNTRNVPQQSLPSPTSAPPGTPTQQPSTPQTPQPPAQPQPSPVSMSPAGFPSVARTQPPTTVSTGKPTSQVPAPPPPAQPPPAAVEAARQIEREAQQQQHLYRVNINNSMPPGRTGMGTPGSQMAPVSLNVPRPNQVSGPVMPSMPPGQWQQAPLPQQQPMPGLPRPVISMQAQAAVAGPRMPSVQPPRSISPSALQDLLRTLKSPSSPQQQQQVLNILKSNPQLMAAFIKQRTAKYVANQPGMQPQPGLQSQPGMQPQPGMHQQPSLQNLNAMQAGVPRPGVPPQQQAMGGLNPQGQALNIMNPGHNPNMASMNPQYREMLRRQLLQQQQQQQQQQQQQQQQQQGSAGMAGGMAGHGQFQQPQGPGGYPPAMQQQQRMQQHLPLQGSSMGQMAAQMGQLGQMGQPGLGADSTPNIQQALQQRILQQQQMKQQIGSPGQPNPMSPQQHMLSGQPQASHLPGQQIATSLSNQVRSPAPVQSPRPQSQPPHSSPSPRIQPQPSPHHVSPQTGSPHPGLAVTMASSIDQGHLGNPEQSAMLPQLNTPSRSALSSELSLVGDTTGDTLEKFVEGL

SEQ ID NO: 103 - protein, 254 aa, Homo sapiens
  misc_feature (1)..(1): Xaa can be any naturally occurring amino acid
XDGSNSGNIGTLSTIPTAAPPSSTGVRKGWHEHVTQDLRSHLVHKLVQAIFPTPDPAALKDRRMENLVAYAKKVEGDMYESANSRDEYYHLLAEKIYKIQKELEEKRRSRLHKQGILGNQPALPAPGAQPPVIPQAQPVRPPRMNSFNPMSLGNVQLPQAPMGPRAASPMNHSVQMNSMGSVPGMAISPSRMPQPPNMMGAHTNNMMAQAPAQSQFLPQNQFPSSSGAMSVGMGQPPAQTGVSQVLCPTGTVAP

SEQ ID NO: 104 - protein, 1105 aa, Homo sapiens
NATSLSNPNPIDPSSMQRAYAALGLPYMNQPQTQLQPQVPGQQPAQPQTHQQMRTLNPLGNNPMNIPAGGITTDQQPPNLISESALPTSLGATNPLMNDGSNSGNIGTLSTIPTAAPPSSTGVRKGWHEHVTQDLRSHLVHKLVQAIFPTPDPAALKDRRMENLVAYAKKVEGDMYESANSRDEYYHLLAEKIYKIQKELEEKRRSRLHKQGILGNQPALPAPGAQPPVIPQAQPVRPPNGPLSLPVNRMQVSQGMNSFNPMSLGNVQLPQAPMGPRAASPMNHSVQMNSMGSVPGMAISPSRMPQPPNMMGAHTNNMMAQAPAQSQFLPQNQFPSSSGAMSVGMGQPPAQTGVSQGQVPGAALPNPLNMLGPQASQLPCPPVTQSPLHPTPPPASTAAGMPSLQHTTPPGMTPPQPAAPTQPSTPVSSSGQTPTPTPGSVPSATQTQSTPTVQAAAQAQVTPQPQTPVQPPSVATPQSSQQQPTPVHAQPPGTPLSQAAASIDNRVPTPSSVASAETNSQQPGPDVPVLEMKTETQAEDTEPDPGESKGEPRSEMMEEDLQGASQVKEETDIAEQKSEPMEVDEKKPEVKVEVKEEEESSSNGTASQSTSPSQPRKKIFKPEELRQALMPTLEALYRQDPESLPFRQPVDPQLLGIPDYFDIVKNPMDLSTIKRKLDTGQYQEPWQYVDDVWLMFNNAWLYNRKTSRVYKFCSKLAEVFEQEIDPVMQSLGYCCGRKYEFSPQTLCCYGKQLCTIPRDAAYYSYQNSSPKYGLLADRYHFCEKCFTEIQGENVTLGDDPSQPQTTISKDQFEKKKNDTLDPEPFVDCKECGRKMHQICVLHYDIIWPSGFVCDNCLKKTGRPRKENKFSAKRLQTTRLGNHLEDRVNKFLRRQNHPEAGEVFVRVVASSDKTVEVKPGMKSRFVDSGEMSESFPYRTKALFAFEEIDGVDVCFFGMHVQEYGSDCPPPNTRRVYISYLDSIHFFRPRCLRTAVYHEILIGYLEYVKKLGYVTGHIWACPPSEGDDYIFHCHPPDQKIPKPKRLQEWYKKMLDKAFAERIIHDYKDIFKQATEDRLTSAKELPYFEGDFWPNVLEESIKELEQEE

SEQ ID NO: 105 - protein, 33 aa, Homo sapiens
  misc_feature (1)..(1): Xaa can be any naturally occurring amino acid
XTCNECKHHVETRWHCTVCEFLNAAVFISFCEH

SEQ ID NO: 106 - protein, 196 aa, Homo sapiens
  misc_feature (1)..(1): Xaa can be any naturally occurring amino acid
XRYHFCEKCFTEIQGENVTLGDDPSQPQTTISKDQFEKKKNDTLDPEPFVDCKECGRKMHQICVLHYDIIWPSGFVCDNCLKKTGRPRKENKFSAKRLQTTRLGNHLEDRVNKFLRRQNHPEAGEVFVRVVASSDKTVEVKPGMKSRFVDSGEMSESFPYRTKALFAFEEIDGVDVCFFGMHVQEYGSDCPPPNTR

SEQ ID NO: 107 - protein, 181 aa, Homo sapiens
  misc_feature (1)..(1): Xaa can be any naturally occurring amino acid
XHLLAEKIYKIQKELEEKRRSRLHKQGILGNQPALPAPGAQPPVIPQAQPVRPPNGPLSLPVNRMQVSQGMNSFNPMSLGNVQLPQAPMGPRAASPMNHSVQMNSMGSVPGMAISPSRMPQPPNMMGAHTNNMMAQAPAQSQFLPQNQFPSSSGAMSVGMGQPPAQTGVSQVLCPTGTVAP

SEQ ID NO: 108 - protein, 693 aa, Homo sapiens
MDRPDEGPPAKTRRLSSSESPQRDPPPPPPPPPLLRLPLPPPQQRPRLQEETEAAQVLADMRGVGLGPALPPPPPYVILEEGGIRAYFTLGAECPGWDSTIESGYGEAPPPTESLEALPTPEASGGSLEIDFQVVQSSSFGGEGALETCSAVGWAPQRLVDPKSKEEAIIIVEDEDEDERESMRSSRRRRRRRRRKQRKVKRESRERNAERMESILQALEDIQLDLEAVNIKAGKAFLRLKRKFIQMRRPFLERRDLIIQHIPGFWVKAFLNHPRISILINRRDEDIFRYLTNLQVQDLRHISMGYKMKLYFQTNPYFTNMVIVKEFQRNRSGRLVSHSTPIRWHRGQEPQARRHGNQDASHSFFSWFSNHSLPEADRIAEIIKNDLWVNPLRYYLRERGSRIKRKKQEMKKRKTRGRCEVVIMEDAPDYYAVEDIFSEISDIDETIHDIKISDFMETTDYFETTDNEITDINENICDSENPDHNEVPNNETTDNNESADDHETTDNNESADDNNENPEDNNKNTDDNEENPNNNENTYGNNFFKGGFWGSHGNNQDSSDSDNEADEASDDEDNDGNEGDNEGSDDDGNEGDNEGSDDDDRDIEYYEKVIEDFDKDQADYEDVIEIISDESVEEEGIEEGIQQDEDIYEEGNYEEEGSEDVWEEGEDSDDSDLEDVLQVPNGWANPGKRGKTG

SEQ ID NO: 109 - protein, 123 aa, Homo sapiens
  misc_feature (1)..(1): Xaa can be any naturally occurring amino acid
XEEAIIIVEDEDEDERESMRSSRRRRRRRRRKQRKVKRESRERNAERMESILQALEDIQLDLEAVNIKAGKAFLRLKRKFIQMRRPFLERRDLIIQHIPGFWVKALHSSVPQPPQNFNFDQPT

SEQ ID NO: 110 - protein, 250 aa, Homo sapiens
MDRPDEGPPAKTRRLSSSESPQRDPPPPPPPPPLLRLPLPPPQQRPRLQEETEAAQIIKNDLWVNPLRYYLRERGSRIKRKKQEMKKRKTRGRCEVVIMEDAPDYYAVEDIFSEISDIDETIHDIKISDFMETTDYFETTDNEITDINENICDSENPDHNEVPNNETTDNNESADDHETTDNNESADDNNENPEDNNKNTDDNEENPNNNENTYGNNFFKGGFWGSHGNNQDSSDSDNEADEASDDEDND

SEQ ID NO: 111 - protein, 584 aa, Homo sapiens
MAGGVDGPIGIPFPDHSSDILSGLNEQRTQGLLCDVVILVEGREFPTHRSVLAACSQYFKKLFTSGAVVDQQNVYEIDFVSAEALTALMDFAYTATLTVSTANVGDILSAARLLEIPAVSHVCADLLDRQILAADAGADAGQLDLVDQIDQRNLLRAKEYLEFFQSNPMNSLPPAAAAAAASFPWSAFGASDDDLDATKEAVAAAVAAVAAGDCNGLDFYGPGPPAERPPTGDGDEGDSNPGLWPERDEDAPTGGLFPPPVAPPAATQNGHYGRGGEEEAASLSEAAPEPGDSPGFLSGAAEGEDGDGPDVDGLAASTLLQQMMSSVGRAGAAAGDSDEESRADDKGVMDYYLKYFSGAHDGDVYPAWSQKVEKKIRAKAFQKCPICEKVIQGAGKLPRHIRTHTGEKPYECNICKVRFTRQDKLKVHMRKHTGEKPYLCQQCGAAFAHNYDLKNHMRVHTGLRPYQCDSCCKTFVRSDHLHRHLKKDGCNGVPSRRGRKPRVRGGAPDPSPGATATPGAPAQPSSPDARRNGQEKHFKDEDEDEDVASPDGLGRLNVAGAGGGGDSGGGPGAATDGNFTAGLA

SEQ ID NO: 112 - protein, 747 aa, Homo sapiens
MADEAALALQPGGSPSAAGADREAASSPAGEPLRKRPRRDGPGLERSPGEPGGAAPEREVPAAARGCPGAAAAALWREAEAEAAAAGGEQEAQATAAAGEGDNGPGLQGPSREPPLADNLYDEDDDDEGEEEEEAAAAAIGYRDNLLFGDEIITNGFHSCESDEEDRASHASSSDWTPRPRIGPYTFVQQHLMIGTDPRTILKDLLPETIPPPELDDMTLWQIVINILSEPPKRKKRKDINTIEDAVKLLQECKKIIVLTGAGVSVSCGIPDFRSRDGIYARLAVDFPDLPDPQAMFDIEYFRKDPRPFFKFAKEIYPGQFQPSLCHKFIALSDKEGKLLRNYTQNIDTLEQVAGIQRIIQCHGSFATASCLICKYKVDCEAVRGDIFNQVVPRCPRCPADEPLAIMKPEIVFFGENLPEQFHRAMKYDKDEVDLLIVIGSSLKVRPVALIPSSIPHEVPQILINREPLPHLHFDVELLGDCDVIINELCHRLGGEYAKLCCNPVKLSEITEKPPRTQKELAYLSELPPTPLHVSEDSSSPERTSPPDSSVIVTLLDQAAKSNDDLDVSESKGCMEEKPQEVQTSRNVESIAEQMENPDLKNVGSSTGEKNERTSVAGTVRKCWPNRVAKEQISRRLDGNQYLFLPPNRYIFHGAEVYSDSEDDVLSSSSCGSNSDSGTCQSPSLEEPMEDESEIEEFYNGLEDEPDVPERAGGAGFGTDGDDQEAINEAISVKQEVTDMNYPSNKS

SEQ ID NO: 113 - protein, 444 aa, Homo sapiens
MCLCSGRKTILEIYPGQFQPSLCHKFIALSDKEGKLLRNYTQNIDTLEQVAGIQRIIQCHGSFATASCLICKYKVDCEAVRGDIFNQVVPRCPRCPADEPLAIMKPEIVFFGENLPEQFHRAMKYDKDEVDLLIVIGSSLKVRPVALIPSSIPHEVPQILINREPLPHLHFDVELLGDCDVIINELCHRLGGEYAKLCCNPVKLSEITEKPPRTQKELAYLSELPPTPLHVSEDSSSPERTSPPDSSVIVTLLDQAAKSNDDLDVSESKGCMEEKPQEVQTSRNVESIAEQMENPDLKNVGSSTGEKNERTSVAGTVRKCWPNRVAKEQISRRLDGNQYLFLPPNRYIFHGAEVYSDSEDDVLSSSSCGSNSDSGTCQSPSLEEPMEDESEIEEFYNGLEDEPDVPERAGGAGFGTDGDDQEAINEAISVKQEVTDMNYPSNKS

SEQ ID NO: 114 - protein, 452 aa, Homo sapiens
MFDIEYFRKDPRPFFKFAKEIYPGQFQPSLCHKFIALSDKEGKLLRNYTQNIDTLEQVAGIQRIIQCHGSFATASCLICKYKVDCEAVRGDIFNQVVPRCPRCPADEPLAIMKPEIVFFGENLPEQFHRAMKYDKDEVDLLIVIGSSLKVRPVALIPSSIPHEVPQILINREPLPHLHFDVELLGDCDVIINELCHRLGGEYAKLCCNPVKLSEITEKPPRTQKELAYLSELPPTPLHVSEDSSSPERTSPPDSSVIVTLLDQAAKSNDDLDVSESKGCMEEKPQEVQTSRNVESIAEQMENPDLKNVGSSTGEKNERTSVAGTVRKCWPNRVAKEQISRRLDGNQYLFLPPNRYIFHGAEVYSDSEDDVLSSSSCGSNSDSGTCQSPSLEEPMEDESEIEEFYNGLEDEPDVPERAGGAGFGTDGDDQEAINEAISVKQEVTDMNYPSNKS

SEQ ID NO: 115 - protein, 704 aa, Homo sapiens
MDHITVPKVENVKLVDRYVSKKPANGILYLTATHLIYVEASGAARKETWIALHHIATVEKLPITSLGCPLTLRCKNFRVAHFVLDSDLVCHEVYISLLKLSQPALPEDLYAFSYNPKSSKEMRESGWKLIDPISDFGRMGIPNRNWTITDANRNYEICSTYPPEIVVPKSVTLGTVVGSSKFRSKERVPVLSYLYKENNAAICRCSQPLSGFYTRCVDDELLLEAISQTNPGSQFMYVVDTRPKLNAMANRAAGKGYENEDNYANIRFRFMGIENIHVMRSSLQKLLEVCELKTPTMSEFLSGLESSGWLRHIKAIMDAGIFITKAVKVEKASVLVHCSDGWDRTAQVCSVASILLDPFYRTFKGLMILIEKEWISMGHKFSQRCGHLDGDSKEVSPIFTQFLDCIWQLMEQFPCAFEFNENFLLEIHDHVFSCQFGNFLGNCQKDREDLRVYEKTHSVWPFLVQRKPDFRNPLYKGFTMYGVLNPSTVPYNIQFWCGMYNRFDKGLQPKQSMLESLLEIKKQRAMLETDVHELEKKLKVRDEPPEEICTCSQLGNILSQHLGSPLTNPLGFMGINGDLNTLMENGTLSREGGLRAQMDQVKSQGADLHHNCCEIVGSLRAINISGDVGISEAMGISGDMCTFEATGFSKDLGICGAMDISEATGISGNLGISEARGFSGDMGILGDTGISKASTKEADYSKHQ

SEQ ID NO: 116 - protein, 232 aa, Homo sapiens
MPSLWDRFSSSSTSSSPSSLPRTPTPDRPPRSAWGSATREEGFDRSTSLESSDCESLDSSNSGFGPEEDTAYLDGVSLPDFELLSDPEDEHLCANLMQLLQESLAQARLGSRRPARLLMPSQLVSQVGKELLRLAYSEPCGLRGALLDVCVEQGKSCHSVGQLALDPSLVPTFQLTLVLRLDSRLWPKIQGLFSSANSPFLPGFSQSLTLSTGFRVIKKKLYSSEQLLIEEC

SEQ ID NO: 117 - protein, 642 aa, Homo sapiens
MEEERKTAELQKNRIQDSVVFEDVAVDFTQEEWALLDLAQRNLYRDVMLENFQNLASLGYPLHTPHLISQWEQEEDLQTVKRELIQGIFMGEHREGFETQLKTNESVASQDICGEKISNEQKIVRFKRNDSWFSSLHENQESCGIDYQNKSHERHLRNHMVENIYECYEENQDGQTFSQVPNLDSLKRNTEVKSCECHECGKAFVDHSSLKSHIRSHTGSKPYQCKECGKAFHFLACFKKHMKTPTEEKPYECKECTKAFSCSSFFRAHMKIHIGKTNYECKECGKGFSCSSSLTEHKRIHSGDKPYECKECGKAFSCSSSLSKHKRIHSGDKPYECKECGKAFSSSSHLIIHIRIHTGEKPYECKECGKAFSESSKLTVHGRTHTGEKPYKCKECGKAYNCPSSLSIHMRKHTGEKPYECLECGKAFYLPTSLNTHVKNQSREKPYECKECGKAFSCPSSFRAHVRDHTGKIQYECKECGKTFSRSSSLTEHLRTHSGEKPYECKECGKAFISSSHLTVHIRTHTGEKPYECKKCGKAFIYPSALRIHMRTHTGEKPYECKECGKAFRHSSYLTVHARMHTGEKPFECLECGKAFSCPSSFRRHVRSHTGEKPYECKECGKAFVCPAYFRRHVKTHTRENI

SEQ ID NO: 118 - protein, 429 aa, Homo sapiens
MQLRNPELHLGCALALRFLALVSWDIPGARALDNGLARTPTMGWLHWERFMCNLDCQEEPDSCISEKLFMEMAELMVSEGWKDAGYEYLCIDDCWMAPQRDSEGRLQADPQRFPHGIRQLANYVHSKGLKLGIYADVGNKTCAGFPGSFGYYDIDAQTFADWGVDLLKFDGCYCDSLENLADGYKHMSLALNRTGRSIVYSCEWPLYMWPFQKPNYTEIRQYCNHWRNFADIDDSWKSIKSILDWTSFNQERIVDVAGPGGWNDPDMLVIGNFGLSWNQQVTQMALWAIMAAPLFMSNDLRHISPQAKALLQDKDVIAINQDPLGKQGYQLRQGDNFEVWERPLSGLAWAVAMINRQEIGGPRSYTIAVASLGKGVACNPACFITQLLPVKRKLGFYEWTSRLRSHINPTGTVLLQLENTMQMSLKDLL

SEQ ID NO: 119 - protein, 199 aa, Homo sapiens
  misc_feature (1)..(1): Xaa can be any naturally occurring amino acid
XDIPGARALDNGLARTPTMGWLHWERFMCNLDCQEEPDSCISEKLFMEMAELMVSEGWKDAGYEYLCIDDCWMAPQRDSEGRLQADPQRFPHGIRQLANYVHSKGLKLGIYADVGNKTCAGFPGSFGYYDIDAQTFADWGVDLLKFDGCYCDSLENLADGESRLSIGHRERSIFIPAFPQYTHHLCTTSSEQSQQSGRL

SEQ ID NO: 120 - protein, 222 aa, Homo sapiens
MQLRNPELHLGCALALRFLALVSWDIPGARALDNGLARTPTMGWLHWERFMCNLDCQEEPDSCISEKLFMEMAELMVSEGWKDAGYEYLCIDDCWMAPQRDSEGRLQADPQRFPHGIRQLANYVHSKGLKLGIYADVGNKTCAGFPGSFGYYDIDAQTFADWGVDLLKFDGCYCDSLENLADGYKHMSLALNRTGRSIVYSCEWPLYMWPFQKSSTLFGSIC

SEQ ID NO: 121 - protein, 199 aa, Homo sapiens
MQLRNPELHLGCALALRFLALVSWDIPGARALDNGLARTPTMGWLHWERFMCNLDCQEEPDSCISEKLFMEMAELMVSEGWKDAGYEYLCIDDCWMAPQRDSEGRLQADPQRFPHGIRQLANYVHSKGLKLGIYADVGNKTCAGFPGSFGYYDIDAQTFADWGVDLLKFDGCYCDSLENLADAQLYRNPTVLQSLAKFC

SEQ ID NO: 122 - protein, 470 aa, Homo sapiens
MQLRNPELHLGCALALRFLALVSWDIPGARALDNGLARTPTMGWLHWERFMCNLDCQEEPDSCISWSFALVAQAGVQCHDLGSPQPPPPRFKQFSCLILASSWNYSEKLFMEMAELMVSEGWKDAGYEYLCIDDCWMAPQRDSEGRLQADPQRFPHGIRQLANYVHSKGLKLGIYADVGNKTCAGFPGSFGYYDIDAQTFADWGVDLLKFDGCYCDSLENLADGYKHMSLALNRTGRSIVYSCEWPLYMWPFQKPNYTEIRQYCNHWRNFADIDDSWKSIKSILDWTSFNQERIVDVAGPGGWNDPDMLVIGNFGLSWNQQVTQMALWAIMAAPLFMSNDLRHISPQAKALLQDKDVIAINQDPLGKQGYQLRQGDNFEVWERPLSGLAWAVAMINRQEIGGPRSYTIAVASLGKGVACNPACFITQLLPVKRKLGFYEWTSRLRSHINPTGTVLLQLENTMQMSLKDLL

SEQ ID NO: 123 - protein, 198 aa, Homo sapiens
DIPGARALDNGLARTPTMGWLHWERFMCNLDCQEEPDSCISEKLFMEMAELMVSEGWKDAGYEYLCIDDCWMAPQRDSEGRLQADPQRFPHGIRQLANYVHSKGLKLGIYADVGNKTCAGFPGSFGYYDIDAQTFADWGVDLLKFDGCYCDSLENLADGESRLSIGHRERSIFIPAFPQYTHHLCTTSSEQSQQSGRL

SEQ ID NO: 124 - protein, 362 aa, Homo sapiens
MQLRNPELHLGCALALRFLALVSWDIPGARALDNGLARTPTMGWLHWERFMCNLDCQEEPDSCISEKLFMEMAELMVSEGWKDAGYEYLCIDDCWMAPQRDSEGRLQADPQRFPHGIRQLANYVHSKGLKLGIYADVGNKTCAGFPGSFGYYDIDAQTFADWGVDLLKFDGCYCDSLENLADGYKHMSLALNRTGRSIVYSCEWPLYMWPFQKPNYTEIRQYCNHWRNFADIDDSWKSIKSILDWTSFNQERIVDVAGPGGWNDPDMLVIGNFGLSWNQQVTQMALWAIMAAPLFMSNDLRHISPQAKALLQDKDVIAINQDPLGKQGYQLRQVNKSIYFKMALYTQYQLCLGPKSIFFPCS

SEQ ID NO: 125 - protein, 363 aa, Homo sapiens
MQLRNPELHLGCALALRFLALVSWDIPGARALDNGLARTPTMGWLHWERFMCNLDCQEEPDSCISEKLFMEMAELMVSEGWKDAGYEYLCIDDCWMAPQRDSEGRLQADPQRFPHGIRQLANYVHSKGLKLGIYADVGNKTCAGFPGSFGYYDIDAQTFADWGVDLLKFDGCYCDSLENLADGYKHMSLALNRTGRSIVYSCEWPLYMWPFQKPNYTEIRQYCNHWRNFADIDDSWKSIKSILDWTSFNQERIVDVAGPGGWNDPDMGDNFEVWERPLSGLAWAVAMINRQEIGGPRSYTIAVASLGKGVACNPACFITQLLPVKRKLGFYEWTSRLRSHINPTGTVLLQLENTMQMSLKDLL

SEQ ID NO: 126 - protein, 417 aa, Homo sapiens
MQLRNPELHLGCALALRFLALVSWDIPGARALDNGLARTPTMGWLHWERFMCNLDCQEEPDSCISEKLFMEMAELMVSEGWKDAGYEYLCIDDCWMAPQRDSEGRLQADPQRFPHGIRQLANYVHSKGLKLGIYADVGNKTCAGFPGSFGYYDIDAQTFADWGVDLLKFDGYKHMSLALNRTGRSIVYSCEWPLYMWPFQKPNYTEIRQYCNHWRNFADIDDSWKSIKSILDWTSFNQERIVDVAGPGGWNDPDMLVIGNFGLSWNQQVTQMALWAIMAAPLFMSNDLRHISPQAKALLQDKDVIAINQDPLGKQGYQLRQGDNFEVWERPLSGLAWAVAMINRQEIGGPRSYTIAVASLGKGVACNPACFITQLLPVKRKLGFYEWTSRLRSHINPTGTVLLQLENTMQMSLKDLL

SEQ ID NO: 127 - protein, 270 aa, Homo sapiens
MQLRNPELHLGCALALRFLALVSWDIPGARALDNGLARTPTMGWLHWERFMCNLDCQEEPDSCISEKLFMEMAELMVSEGWKDAGYEYLCIDDCWMAPQRDSEGRLQADPQRFPHGIRQLANYVHSKGLKLGIYADVGNKTCAGFPGSFGYYDIDAQTFADWGVDLLKFDGCYCDSLENLADGYKHMSLALNRTGRSIVYSCEWPLYMWPFQKPNYTEIRQYCNHWRNFADIDDSWKSIKSILDWTSFNQERIVDVAGPGGWNDPDMVKT

SEQ ID NO: 128 - protein, 810 aa, Homo sapiens
MIPVTELRYFADTQPAYRILKPWWDVFTDYISIVMLMIAVFGGTLQVTQDKMICLPCKWVTKDSCNDSFRGWAAPGPEPTYPNSTILPTPDTGPTGIKYDLDRHQYNYVDAVCYENRLHWFAKYFPYLVLLHTLIFLACSNFWFKFPRTSSKLEHFVSILLKCFDSPWTTRALSETVVEESDPKPAFSKMNGSMDKKSSTVSEDVEATVPMLQRTKSRIEQGIVDRSETGVLDKKEGEQAKALFEKVKKFRTHVEEGDIVYRLYMRQTIIKVIKFILIICYTVYYVHNIKFDVDCTVDIESLTGYRTYRCAHPLATLFKILASFYISLVIFYGLICMYTLWWMLRRSLKKYSFESIREESSYSDIPDVKNDFAFMLHLIDQYDPLYSKRFAVFLSEVSENKLRQLNLNNEWTLDKLRQRLTKNAQDKLELHLFMLSGIPDTVFDLVELEVLKLELIPDVTIPPSIAQLTGLKELWLYHTAAKIEAPALAFLRENLRALHIKFTDIKEIPLWIYSLKTLEELHLTGNLSAENNRYIVIDGLRELKRLKVLRLKSNLSKLPQVVTDVGVHLQKLSINNEGTKLIVLNSLKKMANLTELELIRCDLERIPHSIFSLHNLQEIDLKDNNLKTIEEIISFQHLHRLTCLKLWYNHIAYIPIQIGNLTNLERLYLNRNKIEKIPTQLFYCRKLRYLDLSHNNLTFLPADIGLLQNLQNLAITANRIETLPPELFQCRKLRALHLGNNVLQSLPSRVGELTNLTQIELRGNRLECLPVELGECPLLKRSGLVVEEDLFNTLPPEVKERLWRADKEQA

SEQ ID NO: 129 - protein, 353 aa, Homo sapiens
MGSLYSEYLNPNKVQEHYNYTKETLETQETTSRQVASAFIVILCCAIVVENLLVLIAVARNSKFHSAMYLFLGNLAASDLLAGVAFVANTLLSGSVTLRLTPVQWFAREGSAFITLSASVFSLLAIAIERHVAIAKVKLYGSDKSCRMLLLIGASWLISLVLGGLPILGWNCLGHLEACSTVLPLYAKHYVLCVVTIFSIILLAIVALYVRIYCVVRSSHADMAAPQTLALLKTVTIVLGVFIVCWLPAFSILLLDYACPVHSCPILYKAHYFFAVSTLNSLLNPVIYTWRSRDLRREVLRPLQCWRPGVGVQGRRRGGTPGHHLLPLRSSSSLERGMHMPTSPTFLEGNTVV

SEQ ID NO: 130 - protein, 532 aa, Homo sapiens
MAPSSPRPALPALLVLLGALFPGPGNAQTSVSPSKVILPRGGSVLVTCSTSCDQPKLLGIETPLPKKELLLPGNNRKVYELSNVQEDSQPMCYSNCPDGQSTAKTFLTVYWTPERVELAPLPSWQPVGKNLTLRCQVEGGAPRANLTVVLLRGEKELKREPAVGEPAEVTTTVLVRRDHHGANFSCRTELDLRPQGLELFENTSAPYQLQTFVLPATPPQLVSPRVLEVDTQGTVVCSLDGLFPVSEAQVHLALGDQRLNPTVTYGNDSFSAKASVSVTAEDEGTQRLTCAVILGNQSQETLQTVTIYSFPAPNVILTKPEVSEGTEVTVKCEAHPRAKVTLNGVPAQPLGPRAQLLLKATPEDNGRSFSCSATLEVAGQLIHKNQTRELRVLYGPRLDERDCPGNWTWPENSQQTPMCQAWGNPLPELKCLKDGTFPLPIGESVTVTRDLEGTYLCRARSTQGEVTRKVTVNVLSPRYEIVIITVVAAAVIMGTAGLSTYLYNRQRKIKKYRLQQAQKGTPMKPNTQATPP

SEQ ID NO: 131 - protein, 310 aa, Homo sapiens
MAPSSPRPALPALLVLLGALFPVSEAQVHLALGDQRLNPTVTYGNDSFSAKASVSVTAEDEGTQRLTCAVILGNQSQETLQTVTIYSFPAPNVILTKPEVSEGTEVTVKCEAHPRAKVTLNGVPAQPLGPRAQLLLKATPEDNGRSFSCSATLEVAGQLIHKNQTRELRVLYGPRLDERDCPGNWTWPENSQQTPMCQAWGNPLPELKCLKDGTFPLPIGESVTVTRDLEGTYLCRARSTQGEVTRKVTVNVLSPRYEIVIITVVAAAVIMGTAGLSTYLYNRQRKIKKYRLQQAQKGTPMKPNTQATPP

SEQ ID NO: 132 - protein, 180 aa, Homo sapiens
MAPSSPRPALPALLVLLGALFPGPGNAQTSVSPSKVILPRGGSVLVTCSTSCDQPKLLGIETPLPKKELLLPGNNRKVYELSNVQEDSQPMCYSNCPDGQSTAKTFLTVYWTPERVEGGAPRANLTVVLLRGEKELKREPAVGEPAEVTTTVLVRRDHHGANFSCRTELDLRPQGLELFE

SEQ ID NO: 133 - protein, 333 aa, Homo sapiens
MAAGCCGVKKQKLSSSPPSGSGGGGGASSSSHCSGESQCRAGELGLGGAGTRLNGLGGLTGGGSGSGCTLSPPQGCGGGGGGIALSPPPSCGVGTLLSTPAAATSSSPSSSSAASSSSPGSRKMVVSAEMCCFCFDVLYCHLYGYQQPRTPRFTNEPYPLFVTWKIGRDKRLRGCIGTFSAMNLHSGLREYTLTSALKDSRFPPMTRDELPRLFCSVSLLTNFEDVCDYLDWEVGVHGIRIEFINEKGSKRTATYLPEVAKEQGWDHIQTIDSLLRKGGYKAPITNEFRKTIKLTRYRSEKMTLSYAEYLAHRQHHHFQNGIGHPLPPYNHYS

SEQ ID NO: 134 - protein, 210 aa, Homo sapiens
MVVSAEMCCFCFDVLYCHLYGYQQPRTPRFTNEPYPLFVTWKIGRDKRLRGCIGTFSAMNLHSGLREYTLTSALKDSRFPPMTRDELPRLFCSVSLLTNFEDVCDYLDWEVGVHGIRIEFINEKGSKRTATYLPEVAKEQGWDHIQTIDSLLRKGGYKAPITNEFRKTIKLTRYRSEKMTLSYAEYLAHRQHHHFQNGIGHPLPPYNHYS

SEQ ID NO: 135 - protein, 296 aa, Homo sapiens
MAAGCCGVKKQKLSSSPPSGSGGGGGASSSSHCSGESQCRAGELGLGGAGTRLNGLGGLTGGGSGSGCTLSPPQGCGGGGGGIALSPPPSCGVGTLLSTPAAATSSSPSSSSAASSSSPGSRKMVVSAEMCCFCFDVLYCHLYGYQQPRTPRFTNEPYALKDSRFPPMTRDELPRLFCSVSLLTNFEDVCDYLDWEVGVHGIRIEFINEKGSKRTATYLPEVAKEQGWDHIQTIDSLLRKGGYKAPITNEFRKTIKLTRYRSEKMTLSYAEYLAHRQHHHFQNGIGHPLPPYNHYS

SEQ ID NO: 136 - protein, 888 aa, Homo sapiens [sequence omitted]

SEQ ID NO: 137 - protein, 835 aa, Homo sapiens
MLSRLFRMHGLFVASHPWEVIVGTVTLTICMMSMNMFTGNNKICGWNYECPKFEEDVLSSDIIILTITRCIAILYIYFQFQNLRQLGSKYILGIAGLFTIFSSFVFSTVVIHFLDKELTGLNEALPFFLLLIDLSRASTLAKFALSSNSQDEVRENIARGMAILGPTFTLDALVECLVIGVGTMSGVRQLEIMCCFGCMSVLANYFVFMTFFPACVSLVLELSRESREGRPIWQLSHFARVLEEEENKPNPVTQRVKMIMSLGLVLVHAHSRWIADPSPQNSTADTSKVSLGLDENVSKRIEPSVSLWQFYLSKMISMDIEQVITLSLALLLAVKYIFFEQTETESTLSLKNPITSPVVTQKKVPDNCCRREPMLVRNNQKCDSVEEETGINRERKVEVIKPLVAETDTPNRATFVVGNSSLLDTSSVLVTQEPEIELPREPRPNEECLQILGNAEKGAKFLSDAEIIQLVNAKHIPAYKLETLMETHERGVSIRRQLLSKKLSEPSSLQYLPYRDYNYSLLGGGASSRVLADGMTRGPVVRLPRACDSAEVKAWLETSEGFAVIKEAFDSTSRFARLQKLHTSIAGRNLYIRFQSRSGDAMGMNMISKGTEKALSKLHEYFPEMQILAVSGNYCTDKKPAAINWIEGRGKSVVCEAVIPAKVVREVLKTTTEAMIEVNINKNLVGSAMAGSIGGYNAHAANIVTAIYIACGQDAAQNVGSSNCITLMEASGPTNEDLYISCTMPSIEIGTVGGGTNLLPQQACLQMLGVQGACKDNPGENARQLARIVCGTVMAGELSLMAALAAGHLVKSHMIHNRSKINLQDLQGACTKKTA

SEQ ID NO: 138 - protein, 18 aa, Homo sapiens
MLSRLFRMHGLFVASHPW

SEQ ID NO: 139 - protein, 115 aa, Homo sapiens
YFPEMQILAVSGNYCTDKKPAAINWIEGRGKSVVCEAVIPAKVVREMLGVQGACKDNPGENARQLARIVCGTVMAGELSLMAALAAGHLVKSHMIHNRSKINLQDLQGACTKKTA

SEQ ID NO: 140 - protein, 165 aa, Homo sapiens
  misc_feature (1)..(1): Xaa can be any naturally occurring amino acid
XHEYFPEMQILAVSGNYCTDKKPAAINWIEGRGKSVVCEAVIPAKVVREVLKTTTEAMIEVNINKNLVGSAMAGSIGGYNAHAANIVTAIYIACGQMLGVQGACKDNPGENARQLARIVCGTVMAGELSLMAALAAGHLVKSHMIHNRSKINLQDLQGACTKKTA

SEQ ID NO: 141 - protein, 111 aa, Homo sapiens
MLSRLFRMHGLFVASHPWEVIVGTVTLTICMMSMNMFTGNNKICGWNYECPKFEEDVLSSDIIILTITRCIAILYIYFQFQNLRQLGSKYILGIAGLFTIFSSFVFSTVVI

SEQ ID NO: 142 - protein, 213 aa, Homo sapiens
MHQQKRQPELVEGNLPVFVFPTELIFYADDQSTHKQVLTLYNPYEFALKFKVLCTTPNKYVVVDAAGAVKPQCCVDIVIRHRDVRSCHYGVIDKFRLQVSEQSQRKALGRKEVVATLLPSAKEQQKEEEEKRLKEHLTESLFFEQSFQPENRAVSSGPSLLTVFLGVVCIAALMLPTLGDVESLVPLYLHLSVNQKLVAAYILGLITMAILRT

SEQ ID NO: 143 - protein, 214 aa, Homo sapiens
MHQQKRQPELVEGNLPVFVFPTELIFYADDQSTHKQVLTLYNPYEFALKFKVLCTTPNKYVVVDAAGAVKPQCCVDIVIRHRDVRSCHYGVIDKFRLQVSEQSQRKALGRKEVVATLLPSAKEQQKEEEEKRLKEHLTESLFFEQSFQPGKNRAVSSGPSLLTVFLGVVCIAALMLPTLGDVESLVPLYLHLSVNQKLVAAYILGLITMAILRT

SEQ ID NO: 144 - protein, 159 aa, Homo sapiens
MHQQKRQPELVEGNLPVFVFPTELIFYADDQSTHKQVLTLYNPYEFALKFKVLCTTPNKYVVVDAAGAVKPQCCVDIVIRHRDVRSCHYGVIDKFRLQVSEQSQRKALGRKEVVATLLPSAKEQQKEEEEKRLKEHLTESLFFEQSFQPGLITMAILRT

SEQ ID NO: 145 - protein, 295 aa, Homo sapiens
MELIQDISRPPLEYVKGVPLIKYFAEALGPLQSFQARPDDLLISTYPKSGTTWVSQILDMIYQGGDLEKCHRAPIFMRVPFLEFKVPGIPSGMETLKNTPAPRLLKTHLPLALLPQTLLDQKVKVVYVARNAKDVAVSYYHFYHMAKVYPHPGTWESFLEKFMAGEVSYGSWYQHVQEWWELSRTHPVLYLFYEDMKENPKREIQKILEFVGRSLPEETVDLMVEHTSFKEMKKNPMTNYTTVRREFMDHSISPFMRKGMAGDWKTTFTVAQNERFDADYAKKMAGCSLSFRSEL

SEQ ID NO: 146 - protein, 221 aa, Homo sapiens
MELIQDISRPPLEYVKGVPLIKYFAEALGPLQSFQARPDDLLISTYPKSGTTWVSQILDMIYQGGDLEKCHRAPIFMRVPFLEFKVPGIPSGVCVLGARGVEEDRAGASAHQTFPDPLLRDGDSEKHTSPTTPEDTPAPGSAPPDSVGSEGQGGLCCPQRKGCGGFLLPLLPHGQSVPSPWDLGKLPGEVHGWRSVLWVLVPARARVVGAEPHPPCSLPLL

SEQ ID NO: 147 - protein, 192 aa, Homo sapiens
MELIQDISRPPLEYVKGVPLIKYFAEALGPLQSFQARPDDLLISTYPKSGTTWVSQILDMIYQGGDLEKCHRAPIFMRVPFLEFKVPGIPSGMETLKNTPAPRLLKTHLPLALLPQTLLDQKVKVVYVARNAKDVAVSYYHFYHMAKVYPHPGTWESFLEKFMAGEVSYGSWYQHVQEWWELSRTHPVLYLF

SEQ ID NO: 148 - protein, 262 aa, Homo sapiens
MELIQDISRPPLEYVKGVPLIKYFAEALGPLQSFQARPDDLLISTYPKSGTTWVSQILDMIYQGGDLEKCHRAPIFMRVPFLEFKVPGIPSGVCVLGARGVEEDRAGASAHQTFPDPLLRDGDSEKHTSPTTPEDTPAPGSAPPDSVGSEGQAIQASTEEPSAAQNPKREIQKILEFVGRSLPEETVDLMVEHTSFKEMKKNPMTNYTTVRREFMDHSISPFMRKGMAGDWKTTFTVAQNERFDADYAKKMAGCSLSFRSEL

SEQ ID NO: 149 - protein, 837 aa, Homo sapiens
MASKRKSTTPCMVRTSQVVEQDVPEEVDRAKEKGIGTPQPDVAKDSWAAELENSSKENEVIEVKSMGESQSKKLQGGYECKYCPYSTQNLNEFTEHVDMQHPNVILNPLYVCAECNFTTKKYDSLSDHNSKFHPGEANFKLKLIKRNNQTVLEQSIETTNHVVSITTSGPGTGDSDSGISVSKTPIMKPGKPKADAKKVPKKPEEITPENHVEGTARLVTDTAEILSRLGGVELLQDTLGHVMPSVQLPPNINLVPKVPVPLNTTKYNSALDTNATMINSFNKFPYPTQAELSWLTAASKHPEEHIRIWFATQRLKHGISWSPEEVEEARKKMFNGTIQSVPPTITVLPAQLAPTKVTQPILQTALPCQILGQTSLVLTQVTSGSTTVSCSPITLAVAGVTNHGQKRPLVTPQAAPEPKRPHIAQVPEPPPKVANPPLTPASDRKKTKEQIAHLKASFLQSQFPDDAEVYRLIEVTGLARSEIKKWFSDHRYRCQRGIVHITSESLAKDQLAIAASRHGRTYHAYPDFAPQKFKEKTQGQVKILEDSFLKSSFPTQAELDRLRVETKLSRREIDSWFSERRKLRDSMEQAVLDSMGSGKKGQDVGAPNGALSRLDQLSGAQLTSSLPSPSPAIAKSQEQVHLLRSTFARTQWPTPQEYDQLAAKTGLVRTEIVRWFKENRCLLKTGTVKWMEQYQHQPMADDHGYDAVARKATKPMAESPKNGGDVVPQYYKDPKKLCEEDLEKLVTRVKVGSEPAKDCLPAKPSEATSDRSEGSSRDGQGSDENEESSVVDYVEVTVGEEDAISDRSDSWSQAAAEGVSELAESDSDCVPAEAGQA

SEQ ID NO: 150 - protein, 166 aa, Homo sapiens
MASKRKSTTPCMVRTSQVVEQDVPEEVDRAKEKGIGTPQPDVAKDSWAAELENSSKENEVIEVKSMGESQSKKLQGGYECKYCPYSTQNLNEFTEHVDMQHPNVILNPLYVCAECNFTTKKYDSLSDHNSKFHPGEANFKLKLIKRNNQTVLEQSIETTNHVVSIT

SEQ ID NO: 151 - protein, 574 aa, Homo sapiens
MWTFLGIATFTYFYKKFGDFITLANREVLLCVLVFLSLGLVLSYRCRHRNGGLLGRQQSGSQFALFSDILSGLPFIGFFWAKSPPESENKEQLEARRRRKGTNISETSLIGTAACTSTSSQNDPEVIIVGAGVLGSALAAVLSRDGRKVTVIERDLKEPDRIVGEFLQPGGYHVLKDLGLGDTVEGLDAQVVNGYMIHDQESKSEVQIPYPLSENNQVQSGRAFHHGRFIMSLRKAAMAEPNAKFIEGVVLQLLEEDDVVMGVQYKDKETGDIKELHAPLTVVADGLFSKFRKSLVSNKVSVSSHFVGFLMKNAPQFKANHAELILANPSPVLIYQISSSETRVLVDIRGEMPRNLREYMVEKIYPQIPDHLKEPFLEATDNSHLRSMPASFLPPSSVKKRGVLLLGDAYNMRHPLTGGGMTVAFKDIKLWRKLLKGIPDLYDDAAIFEAKKSFYWARKTSHSFVVNILAQALYELFSATDDSLHQLRKACFLYFKLGGECVAGPVGLLSVLSPNPLVLIGHFFAVAIYAVYFCFKSEPWITKPRALLSSGAVLYKACSVIFPLIYSEMKYMVH

SEQ ID NO: 152 - protein, 184 aa, Homo sapiens
MLEFHFEGEEQPLSMMKKFLKSSWVRIGFVPEEERNVLRRRKGTNISETSLIGTAACTSTSSQNDPEVIIVGAGVLGSALAAVLSRDGRKVTVIERDLKEPDRIVGEFLQPGGYHVLKDLGLGDTVEGLDAQVVNGYMIHDQESKSEVQIPYPLSENNQVQSGRAFHHGRFIMSLRKAAMAEPK

SEQ ID NO: 153 - protein, 479 aa, Homo sapiens
MLRRKGTNISETSLIGTAACTSTSSQNDPEVIIVGAGVLGSALAAVLSRDGRKVTVIERDLKEPDRIVGEFLQPGGYHVLKDLGLGDTVEGLDAQVVNGYMIHDQESKSEVQIPYPLSENNQVQSGRAFHHGRFIMSLRKAAMAEPNAKFIEGVVLQLLEEDDVVMGVQYKDKETGDIKELHAPLTVVADGLFSKFRKSLVSNKVSVSSHFVGFLMKNAPQFKANHAELILANPSPVLIYQISSSETRVLVDIRGEMPRNLREYMVEKIYPQIPDHLKEPFLEATDNSHLRSMPASFLPPSSVKKRGVLLLGDAYNMRHPLTGGGMTVAFKDIKLWRKLLKGIPDLYDDAAIFEAKKSFYWARKTSHSFVVNILAQALYELFSATDDSLHQLRKACFLYFKLGGECVAGPVGLLSVLSPNPLVLIGHFFAVAIYAVYFCFKSEPWITKPRALLSSGAVLYKACSVIFPLIYSEMKYMVH

SEQ ID NO: 154 - protein, 163 aa, Homo sapiens
RGEMPRNLREYMVEKIYPQIPDHLKEPFLEATDNSHLRSMPASFLPPSSVKKRGVLLLGDAYNMRHPLTGGGMTVAFKDIKLWRKLLKGIPDLYDDAAIFEAKKSFYWARKTSHSFVVNILAQALYELFSATDDSLHQLRKACFLYFKLGGECVAGPVGLLSV

SEQ ID NO: 155 - protein, 906 aa, Homo sapiens
MQAAVAVSVPFLLLCVLGTCPPARCGQAGDASLMELEKRKENRFVERQSIVPLRLIYRSGGEDESRHDALDTRVRGDLGGPQLTHVDQASFQVDAFGTSFILDVVLNHDLLSSEYIERHIEHGGKTVEVKGGEHCYYQGHIRGNPDSFVALSTCHGLHGMFYDGNHTYLIEPEENDTTQEDFHFHSVYKSRLFEFSLDDLPSEFQQVNITPSKFILKPRPKRSKRQLRRYPRNVEEETKYIELMIVNDHLMFKKHRLSVVHTNTYAKSVVNMADLIYKDQLKTRIVLVAMETWATDNKFAISENPLITLREFMKYRRDFIKEKSDAVHLFSGSQFESSRSGAAYIGGICSLLKGGGVNEFGKTDLMAVTLAQSLAHNIGIISDKRKLASGECKCEDTWSGCIMGDTGYYLPKKFTQCNIEEYHDFLNSGGGACLFNKPSKLLDPPECGNGFIETGEECDCGTPAECVLEGAECCKKCTLTQDSQCSDGLCCKKCKFQPMGTVCREAVNDCDIRETCSGNSSQCAPNIHKMDGYSCDGVQGICFGGRCKTRDRQCKYIWGQKVTASDKYCYEKLNIEGTEKGNCGKDKDTWIQCNKRDVLCGYLLCTNIGNIPRLGELDGEITSTLVVQQGRTLNCSGGHVKLEEDVDLGYVEDGTPCGPQMMCLEHRCLPVASFNFSTCLSSKEGTICSGNGVCSNELKCVCNRHWIGSDCNTYFPHNDDAKTGITLSGNGVAGTNIIIGIIAGTILVLALILGITAWGYKNYREQRQLPQGDYVKKPGDGDSFYSDIPPGVSTNSASSSKKRSNGLSHSWSERIPDTKHISDICENGRPRSNSWQGNLGGNKKKIRGKRFRPRSNSTETLSPAKSPSSSTGSIASSRKYPYPMPPLPDEDKKVNRQSARLWETSI

SEQ ID NO: 156 - protein, 196 aa, Homo sapiens
MQAAVAVSVPFLLLCVLGTCPPARCGQAGDASLMELEKRKENRFVERQSIVPLRLIYRSGGEDESRHDALDTRVRGDLGGPQIQMFLKSESQKTIYQIQLTHVDQASFQVDAFGTSFILDVVLNHDLLSSEYIERHIEHGGKTVEVKGGEHCYYQGHIRGNPDSFVALSTCHGLHGMFYDGNHTYLIEPEENDTTQ

SEQ ID NO: 157 - protein, 859 aa, Homo sapiens
MQAAVAVSVPFLLLCVLGTCPPARCGQAGDASLMELEKRKENRFVERQSIVPLRLIYRSGGEDESRHDALDTRVRGDLGGPQLTHVDQASFQVDAFGTSFILDVVLNHDLLSSEYIERHIEHGGKTVEVKGGEHCYYQGHIRGNPDSFVALSTCHGLHGMFYDGNHTYLIEPEENDTTQEDFHFHSVYKSRLFEFSLDDLPSEFQQVNITPSKFILKPRPKRSKRQLRRYPRNVEEETKYIELMIVNDHLMFKKHRLSVVHTNTYAKSVVNMADLIYKDQLKTRIVLVAMETWATDNKFAISENPLITLREFMKYRRDFIKEKSDAVHLFSGSQFESSRSGAAYIGGICSLLKGGGVNEFGKTDLMAVTLAQSLAHNIGIISDKRKLASGECKCEDTWSGCIMGDTGYYLPKKFTQCNIEEYHDFLNSGGGACLFNKPSKLLDPPECGNGFIETGEECDCGTPAECVLEGAECCKKCTLTQDSQCSDGLCCKKCKFQPMGTVCREAVNDCDIRETCSGNSSQCAPNIHKMDGYSCDGVQGICFGGRCKTRDRQCKYIWGQKVTASDKYCYEKLNIEGTEKGNCGKDKDTWIQCNKRDVLCGYLLCTNIGNIPRLGELDGEITSTLVVQQGRTLNCSGGHVKLEEDVDLGYVEDGTPCGPQMMCLEHRCLPVASFNFSTCLSSKEGTICSGNGVCSNELKCVCNRHWIGSDCNTYFPHNDDAKTGITLSGNGVAGTNIIIGIIAGTILVLALILGITAWGYKNYREQRQLPQGDYVKKPGDGDSFYSDIPPGVSTNSASSSKKRSNGLSHSWSERIPDTKHISDICENGRPRSNSWQGNLGGNKKKIRGKRFRPRSNSTE

SEQ ID NO: 158 - protein, 899 aa, Homo sapiens
MQAAVAVSVPFLLLCVLGTCPPARCGQAGDASLMELEKRKENRFVERQSIVPLRLIYRSGGEDESRHDALDTRVRGDLGGPQLTHVDQASFQVDAFGTSFILDVVLNHDLLSSEYIERHIEHGGKTVEVKGGEHCYYQGHIRGNPDSFVALSTCHGLHGMFYDGNHTYLIEPEENDTTQEDFHFHSVYKSRLFEFSLDDLPSEFQQVNITPSKFILKPRPKRSKRQLRRYPRNVEEETKYIELMIVNDHLMFKKHRLSVVHTNTYAKSVVNMADLIYKDQLKTRIVLVAMETWATDNKFAISENPLITLREFMKYRRDFIKEKSDAVHLFSGSQFESSRSGAAYIGGICSLLKGGGVNEFGKTDLMAVTLAQSLAHNIGIISDKRKLASGECKCEDTWSGCIMGDTGYYLPKKFTQCNIEEYHDFLNSGGGACLFNKPSKLLDPPECGNGFIETGEECDCGTPAECVLEGAECCKKCTLTQDSQCSDGLCCKKCKFQPMGTVCREAVNDCDIRETCSGNSSQCAPNIHKMDGYSCDGVQGICFGGRCKTRDRQCKYIWGQKVTASDKYCYEKLNIEGTEKGNCGKDKDTWIQCNKRDVLCGYLLCTNIGNIPRLGELDGEITSTLVVQQGRTLNCSGGHVKLEEDVDLGYVEDGTPCGPQMMCLEHRCLPVASFNFSTCLSSKEGTICSGNGVCSNELKCVCNRHWIGSDCNTYFPHNDDAKTGITLSGNGVAGTNIIIGIIAGTILVLALILGITAWGYKNYREQRSNGLSHSWSERIPDTKHISDICENGRPRSNSWQGNLGGNKKKIRGKRFRPRSNSTEYLNPWFKRDYNVAKWVEDVNKNTEGPYFRTLSPAKSPSSSTGSIASSRKYPYPMPPLPDEDKKVNRQSARLWETSI

SEQ ID NO: 159 - protein, 804 aa, Homo sapiens
MELEKRKENRFVERQSIVPLRLIYRSGGEDESRHDALDTRVRGDLGGPQLTHVDQASFQVDAFGTSFILDVVLNHDLLSSEYIERHIEHGGKTVEVKGGEHCYYQGHIRGNPDSFVALSTCHGLHGMFYDGNHTYLIEPEENDTTQEDFHFHSVYKSRLFEFSLDDLPSEFQQVNITPSKFILKPRPKRSKRQLRRYPRNVEEETKYIELMIVNDHLMFKKHRLSVVHTNTYAKSVVNMADLIYKDQLKTRIVLVAMETWATDNKFAISENPLITLREFMKYRRDFIKEKSDAVHLFSGSQFESSRSGAAYIGGICSLLKGGGVNEFGKTDLMAVTLAQSLAHNIGIISDKRKLASGECKCEDTWSGCIMGDTGYYLPKKFTQCNIEEYHDFLNSGGGACLFNKPSKLLDPPECGNGFIETGEECDCGTPAECVLEGAECCKKCTLTQDSQCSDGLCCKKCKFQPMGTVCREAVNDCDIRETCSGNSSQCAPNIHKMDGYSCDGVQGICFGGRCKTRDRQCKYIWGQKVTASDKYCYEKLNIEGTEKGNCGKDKDTWIQCNKRDVLCGYLLCTNIGNIPRLGELDGEITSTLVVQQGRTLNCSGGHVKLEEDVDLGYVEDGTPCGPQMMCLEHRCLPVASFNFSTCLSSKEGTICSGNGVCSNELKCVCNRHWIGSDCNTYFPHNDDAKTGITLSGNGVAGTNIIIGIIAGTILVLALILGITAWGYKNYREQRQLPQGDYVKKPGDGDSFYSDIPPGVSTNSASSSKKRSNGLSHSWSERIPDTKHISDICENGRPRSNSWQG

SEQ ID NO: 160 - protein, 870 aa, Homo sapiens
MQAAVAVSVPFLLLCVLGTCPPARCGQAGDASLMELEKRKENRFVERQSIVPLRLIYRSGGEDESRHDALDTRVRGDLGGPQLTHVDQASFQVDAFGTSFILDVVLNHDLLSSEYIERHIEHGGKTVEVKGGEHCYYQGHIRGNPDSFVALSTCHGLHGMFYDGNHTYLIEPEENDTTQEDFHFHSVYKSRLFEFSLDDLPSEFQQVNITPSKFILKPRPKRSKRQLRRYPRNVEEETKYIELMIVNDHLMFKKHRLSVVHTNTYAKSVVNMADLIYKDQLKTRIVLVAMETWATDNKFAISENPLITLREFMKYRRDFIKEKSDAVHLFSGSQFESSRSGAAYIGGICSLLKGGGVNEFGKTDLMAVTLAQSLAHNIGIISDKRKLASGECKCEDTWSGCIMGDTGYYLPKKFTQCNIEEYHDFLNSGGGACLFNKPSKLLDPPECGNGFIETGEECDCGTPAECVLEGAECCKKCTLTQDSQCSDGLCCKKCKFQPMGTVCREAVNDCDIRETCSGNSSQCAPNIHKMDGYSCDGVQGICFGGRCKTRDRQCKYIWGQKVTASDKYCYEKLNIEGTEKGNCGKDKDTWIQCNKRDVLCGYLLCTNIGNIPRLGELDGEITSTLVVQQGRTLNCSGGHVKLEEDVDLGYVEDGTPCGPQMMCLEHRCLPVASFNFSTCLSSKEGTICSGNGVCSNELKCVCNRHWIGSDCNTYFPHNDDAKTGITLSGNGVAGTNIIIGIIAGTILVLALILGITAWGYKNYREQRSNGLSHSWSERIPDTKHISDICENGRPRSNSWQGNLGGNKKKIRGKRFRPRSNSTETLSPAKSPSSSTGSIASSRKYPYPMPPLPDEDKKVNRQSARLWETSI

SEQ ID NO: 161 - protein, 342 aa, Homo sapiens
MQAAVAVSVPFLLLCVLGTCPPARCGQAGDASLMELEKRKENRFVERQSIVPLRLIYRSGGEDESRHDALDTRVRGDLGGPQLTHVDQASFQVDAFGTSFILDVVLNHDLLSSEYIERHIEHGGKTVEVKGGEHCYYQGHIRGNPDSFVALSTCHGLHGMFYDGNHTYLIEPEENDTTQEDFHFHSVYKSRLFEFSLDDLPSEFQQVNITPSKFILKPRPKRSKRQLRRYPRNVEEETKYIELMIVNDHLMFKKHRLSVVHTNTYAKSVVNMADLIYKDQLKTRIVLVAMETWATDNKFAISENPLITLREFMKYRRDFIKEKSDAVHLFSYVTSVMMYYFF

SEQ ID NO: 162 - protein, 264 aa, Homo sapiens
  misc_feature (1)..(1): Xaa can be any naturally occurring amino acid
XCNRHWIGSDCNTYFPHNDDAKTGITLSGNGVAGTNIIIGIIAGTILVLALILGITAWGYKNYREQRQLPQGDYVKKPGDGDSFYSDIPPGVSTNSASSSKKRSAFLSHFQISTCSITHYSISQNISLFCSRSNGLSHSWSERIPDTKHISDICENGRPRSNSWQGNLGGNKKKIRGKRFRPRSNSTEYLNPWFKRDYNVAKWVEDVNKNTEGPYFRTLSPAKSPSSSTGSIASSRKYPYPMPPLPDEDKKVNRQSARLWETSI

SEQ ID NO: 163 - protein, 330 aa, Homo sapiens
EEDVDLGYVEDGTPCGPQMMCLEHRCLPVASFNFSTCLSSKEGTICSGNGVCSNELKCVCNRHWIGSDCNTYFPHNDDAKTGITLSGNGVAGTNIIIGIIAGTILVLALILGITAWGYKNYREQRQLPQGDYVKKPGDGDSFYSDIPPGVSTNSASSSKKRSNGLSHSWSERIPDTKHISDICENGRPRSNSWQGNLGGNKKKIRGKRFRPRSNSTEREPQAPEPGHSLAQTVPSQGISPGGSDSPQTGSLDHRYLNPWFKRDYNVAKWVEDVNKNTEGPYFRTLSPAKSPSSSTGSIASSRKYPYPMPPLPDEDKKVNRQSARLWETSI

SEQ ID NO: 164 - protein, 1866 aa, Homo sapiens
MDPVGLQLGNKNLWSCLVRLLTKDPEWLNAKMKFFLPNTDLDSRNETLDPEQRVILQLNKLHVQGSDTWQSFIHCVCMQLEVPLDLEVLLLSTFGYDDGFTSQLGAEGKSQPESQLHHGLKRPHQSCGSSPRRKQCKKQQLELAKKYLQLLRTSAQQRYRSQIPGSGQPHAFHQVYVPPILRRATASLDTPEGAIMGDVKVEDGADVSISDLFNTRVNKGPRVTVLLGKAGMGKTTLAHRLCQKWAEGHLNCFQALFLFEFRQLNLITRFLTPSELLFDLYLSPESDHDTVFQYLEKNADQVLLIFDGLDEALQPMGPDGPGPVLTLFSHLCNGTLLPGCRVMATSRPGKLPACLPAEAAMVHMLGFDGPRVEEYVNHFFSAQPSREGALVELQTNGRLRSLCAVPALCQVACLCLHHLLPDHAPGQSVALLPNMTQLYMQMVLALSPPGHLPTSSLLDLGEVALRGLETGKVIFYAKDIAPPLIAFGATHSLLTSFCVCTGPGHQQTGYAFTHLSLQEFLAALHLMASPKVNKDTLTQYVTLHSRWVQRTKARLGLSDHLPTFLAGLASCTCRPFLSHLAQGNEDCVGAKQAAVVQVLKKLATRKLTGPKVVELCHCVDETQEPELASLTAQSLPYQLPFHNFPLTCTDLATLTNILEHREAPIHLDFDGCPLEPHCPEALVGCGQIENLSFKSRKCGDAFAEALSRSLPTMGRLQMLGLAGSKITARGISHLVKALPLCPQLKEVSFRDNQLSDQVVLNIVEVLPHLPRLRKLDLSSNSICVSTLLCLARVAVTCPTVRMLQAREADLIFLLSPPTETTAELQRAPDLQESDGQRKGAQSRSLTLRLQKCQLQVHDAEALIALLQEGPHLEEVDLSGNQLEDEGCRLMAEAASQLHIARKLDLSNNGLSVAGVHCVLRAVSACWTLAELHISLQHKTVIFMFAQEPEEQKGPQERAAFLDSLMLQMPSELPLSSRRMRLTHCGLQEKHLEQLCKALGGSCHLGHLHLDFSGNALGDEGAARLAQLLPGLGALQSLNLSENGLSLDAVLGLVRCFSTLQWLFRLDISFESQHILLRGDKTSRDMWATGSLPDFPAAAKFLGFRQRCIPRSLCLSECPLEPPSLTRLCATLKDCPGPLELQLSCEFLSDQSLETLLDCLPQLPQLSLLQLSQTGLSPKSPFLLANTLSLCPRVKKVDLRSLHHATLHFRSNEEEEGVCCGRFTGCSLSQEHVESLCWLLSKCKDLSQVDLSANLLGDSGLRCLLECLPQVPISGLLDLSHNSISQESALYLLETLPSCPRVREASVNLGSEQSFRIHFSREDQAGKTLRLSECSFRPEHVSRLATGLSKSLQLTELTLTQCCLGQKQLAILLSLVGRPAGLFSLRVQEPWADRARVLSLLEVCAQASGSVTEISISETQQQLCVQLEFPRQEENPEAVALRLAHCDLGAHHSLLVGQLMETCARLQQLSLSQVNLCEDDDASSLLLQSLLLSLSELKTFRLTSSCVSTEGLAHLASGLGHCHHLEELDLSNNQFDEEGTKALMRALEGKWMLKRLDLSHLLLNSSTLALLTHRLSQMTCLQSLRLNRNSIGDVGCCHLSEALRAATSLEELDLSHNQIGDAGVQHLATILPGLPELRKIDLSGNSISSAGGVQLAESLVLCRRLEELMLGCNALGDPTALGLAQELPQHLRVLHLPFSHLGPGGALSLAQALDGSPHLEEISLAENNLAGGVLRFCMELPLLRQIDLVSCKIDNQTAKLLTSSFTSCPALEVILLSWNLLGDEAAAELAQVLPQMGRLKRVDLEKNQITALGAWLLAEGLAQGSSIQVIRLWNNPIPCDMAQHLKSQEPRLDFAFFDNQPQAPWGT

SEQ ID NO: 165 - protein, 157 aa, Homo sapiens
  misc_feature (1)..(1): Xaa can be any naturally occurring amino acid
XLSANLLGDSGLRCLLECLPQVPISGLLDLSHNSISQESALYLLETLPSCPRVREASVNLGSEQSFRIHFSREDQAGKTLRLSECSFRPEHVSRLATGLSKSLQLTELTLTQCCLGQKQLAILLSLVGRPAGLFSLRLHKAHRETVLPHTGGLCFGI

SEQ ID NO: 166 - protein, 631 aa, Homo sapiens
LTCTDLATLTNILEHREAPIHLDFDGCPLEPHCPEALVGCGQIENLSFKSRKCGDAFAEALSRSLPTMGRLQMLGLSSNSICVSTLLCLARVAVTCPTVRMLQAREADLIFLLSPPTETTAELQRAPDLQESDGQRKGAQSRSLTLRLQKCQLQVHDAEALIALLQEGPHLEEVDLSGNQLEDEGCRLMAEAASQLHIARKLDLSNNGLSVAGVHCVLRAVSACWTLAELHISLQHKTVIFMFAQEPEEQKGPQERAAFLDSLMLQMPSELPLSSRRMRLTHCGLQEKHLEQLCKALGGSCHLGHLHLDFSGNALGDEGAARLAQLLPGLGALQSLNLSENGLSLDAVLGLVRCFSTLQWLFRLDISFESQHILLRGDKTSSLSECPLEPPSLTRLCATLKDCPGPLELQLSCEFLSDQSLETLLDCLPQLPQLSLLQLSQTGLSPKSPFLLANTLSLCPRVKKVDLRSLHHATLHFRSNEEEEGVCCGRFTGCSLSQEHVESLCWLLSKCKDLSQVDLGSEQSFRIHFSREDQAGKTLRLSECSFRPEHVSRLATGLSKSLQLTELTLTQCCLGQKQLAILLSLVGRPAGLFSLRDSTRHTEKLSFPTLEACALGFKKKRKKERKKVSED

SEQ ID NO: 167 - protein, 387 aa, Homo sapiens
  misc_feature (1)..(1): Xaa can be any naturally occurring amino acid
XELPLSSRRMRLTHCGLQEKHLEQLCKALGGSCHLGHLHLDFSGNALGDEGAARLAQLLPGLGALQSLNLSENGLSLDAVLGLVRCFSTLQWLFRLDISFESQHILLRGDKTSRDMWATGSLPDFPAAAKFLGFRQRCIPRSLCLSECPLEPPSLTRLCATLKDCPGPLELQLSCEFLSDQSLETLLDCLPQLPQLSLLQLSQTGLSPKSPFLLANTLSLCPRVKKVDLRSLHHATLHFRSNEEEEGVCCGLSANLLGDSGLRCLLECLPQVPISGLLDLSHNSISQESALYLLETLPSCPRVREASVNLGSEQSFRIHFSREDQAGKTLRLSECSFRPEHVSRLATGLSKSLQLTELTLTQCCLGQKQLAILLSLVGRPAGLFSLS

SEQ ID NO: 168 - protein, 1837 aa, Homo sapiens
MDPVGLQLGNKNLWSCLVRLLTKDPEWLNAKMKFFLPNTDLDSRNETLDPEQRVILQLNKLHVQGSDTWQSFIHCVCMQLEVPLDLEVLLLSTFGYDDGFTSQLGAEGKSQPESQLHHGLKRPHQSCGSSPRRKQCKKQQLELAKKYLQLLRTSAQQRYRSQIPGSGQPHAFHQVYVPPILRRATASLDTPEGAIMGDVKVEDGADVSISDLFNTRVNKGPRVTVLLGKAGMGKTTLAHRLCQKWAEGHLNCFQALFLFEFRQLNLITRFLTPSELLFDLYLSPESDHDTVFQYLEKNADQVLLIFDGLDEALQPMGPDGPGPVLTLFSHLCNGTLLPGCRVMATSRPGKLPACLPAEAAMVHMLGFDGPRVEEYVNHFFSAQPSREGALVELQTNGRLRSLCAVPALCQVACLCLHHLLPDHAPGQSVALLPNMTQLYMQMVLALSPPGHLPTSSLLDLGEVALRGLETGKVIFYAKDIAPPLIAFGATHSLLTSFCVCTGPGHQQTGYAFTHLSLQEFLAALHLMASPKVNKDTLTQYVTLHSRWVQRTKARLGLSDHLPTFLAGLASCTCRPFLSHLAQGNEDCVGAKQAAVVQVLKKLATRKLTGPKVVELCHCVDETQEPELASLTAQSLPYQLPFHNFPLTCTDLATLTNILEHREAPIHLDFDGCPLEPHCPEALVGCGQIENLSFKSRKCGDAFAEALSRSLPTMGRLQMLGLAGSKITARGISHLVKALPLCPQLKEVSFRDNQLSDQVVLNIVEVLPHLPRLRKLDLSSNSICVSTLLCLARVAVTCPTVRMLQAREADLIFLLSPPTETTAELQRAPDLQESDGQRKGAQSRSLTLRLQKCQLQVHDAEALIALLQEGPHLEEVDLSGNQLEDEGCRLMAEAASQLHIARKLDLSNNGLSVAGVHCVLRAVSACWTLAELHISLQHKTVIFMFAQEPEEQKGPQERAAFLDSLMLQMPSELPLSSRRMRLTHCGLQEKHLEQLCKALGGSCHLGHLHLDFSGNALGDEGAARLAQLLPGLGALQSLNLSENGLSLDAVLGLVRCFSTLQWLFRLDISFESQHILLRGDKTSRDMWATGSLPDFPAAAKFLGFRQRCIPRSLCLSECPLEPPSLTRLCATLKDCPGPLELQLSCEFLSDQSLETLLDCLPQLPQLSLLQLSQTGLSPKSPFLLANTLSLCPRVKKVDLRSLHHATLHFRSNEEEEGVCCGLSANLLGDSGLRCLLECLPQVPISGLLDLSHNSISQESALYLLETLPSCPRVREASVNLGSEQSFRIHFSREDQAGKTLRLSECSFRPEHVSRLATGLSKSLQLTELTLTQCCLGQKQLAILLSLVGRPAGLFSLRVQEPWADRARVLSLLEVCAQASGSVTEISISETQQQLCVQLEFPRQEENPEAVALRLAHCDLGAHHSLLVGQLMETCARLQQLSLSQVNLCEDDDASSLLLQSLLLSLSELKTFRLTSSCVSTEGLAHLASGLGHCHHLEELDLSNNQFDEEGTKALMRALEGKWMLKRLDLSHLLLNSSTLALLTHRLSQMTCLQSLRLNRNSIGDVGCCHLSEALRAATSLEELDLSHNQIGDAGVQHLATILPGLPELRKIDLSGNSISSAGGVQLAESLVLCRRLEELMLGCNALGDPTALGLAQELPQHLRVLHLPFSHLGPGGALSLAQALDGSPHLEEISLAENNLAGGVLRFCMELPLLRQIDLVSCKIDNQTAKLLTSSFTSCPALEVILLSWNLLGDEAAAELAQVLPQMGRLKRVDLEKNQITALGAWLLAEGLAQGSSIQVIRLWNNPIPCDMAQHLKSQEPRLDFAFFDNQPQAPWGT

SEQ ID NO: 169 - protein, 1057 aa, Homo sapiens
  misc_feature (1)..(1): Xaa can be any naturally occurring amino acid
XSELLFDLYLSPESDHDTVFQYLEKNADQVLLIFDGLDEALQPMGPDGPGPVLTLFSHLCNGTLLPGCRVMATSRPGKLPACLPAEAAMVHMLGFDGPRVEEYVNHFFSAQPSREGALVELQTNGRLRSLCAVPALCQVACLCLHHLLPDHAPGQSVALLPNMTQLYMQMVLALSPPGHLPTSSLLDLGEVALRGLETGKVIFYAKDIAPPLIAFGATHSLLTSFCVCTGPGHQQTGYAFTHLSLQEFLAALHLMASPKVNKDTLTQYVTLHSRWVQRTKARLGLSDHLPTFLAGLASCTCRPFLSHLAQGNEDCVGAKQAAVVQVLKKLATRKLTGPKVVELCHCVDETQEPELASLTAQSLPYQLPFHNFPLTCTDLATLTNILEHREAPIHLDFDGCPLEPHCPEALVGCGQIENLSFKSRKCGDAFAEALSRSLPTMGRLQMLGLAGSKITARGISHLVKALPLCPQLKEVSFRDNQLSDQVVLNIVEVLPHLPRLRKLDLSSNSICVSTLLCLARVAVTCPTVRMLQAREADLIFLLSPPTETTAELQRAPDLQESDGQRKGAQSRSLTLRLQKCQLQVHDAEALIALLQEGPHLEEVDLSGNQLEDEGCRLMAEAASQLHIARKLDLSNNGLSVAGVHCVLRAVSACWTLAELHISLQHKTVIFMFAQEPEEQKGPQERAAFLDSLMLQMPSELPLSSRRMRLTHCGLQEKHLEQLCKALGGSCHLGHLHLDFSGNALGDEGAARLAQLLPGLGALQSLNLSENGLSLDAVLGLVRCFSTLQWLFRLDISFESQHILLRGDKTSRDMWATGSLPDFPAAAKFLGFRQRCIPRSLCLSECPLEPPSLTRLCATLKDCPGPLELQLSCEFLSDQSLETLLDCLPQLPQLSLLQLSQTGLSPKSPFLLANTLSLCPRVKKVDLRSLHHATLHFRSNEEEEGVCCGRFTGCSLSQEHVESLCWLLSKCKDLSQVDLSANLLGDSGLRCLLECLPQVPISGLLDLSHNSISQESALYLLETLPSCPRVREASVKCLGSWHVWAPCFPRPFSLQPGL

SEQ ID NO: 170 - protein, 74 aa, Homo sapiens
MDPVGLQLGNKNLWSCLVRLLTKDPEWLNAKMKFFLPNTDLDSRNETLDPEQRVILQLNKLHVQGSDTWQSFIH

SEQ ID NO: 171 - protein, 110 aa, Homo sapiens
  misc_feature (1)..(1): Xaa can be any naturally occurring amino acid
XASGLGHCHHLEELDLSNNQFDEEGTKALMRALEGKWMLKRLDLSHLLLNSSTLALLTHRLSQMTCLQSLSLTLSPRLECSGMISLHCNLCLLGSSDSGASAAQVAGITD

SEQ ID NO: 172 - protein, 702 aa, Homo sapiens
QKCQLQVHDAEALIALLQEGPHLEEVDLSGNQLEDEGCRLMAEAASQLHIARKLDLSNNGLSVAGVHCVLRAVSACWTLAELHISLQHKTVIFMFAQEPEEQKGPQERAAFLDSLMLQMPSELPLSSRRMRLTHCGLQEKHLEQLCKALGGSCHLGHLHLDFSGNALGDEGAARLAQLLPGLGALQSLNLSENGLSLDAVLGLVRCFSTLQWLFRLDISFESQHILLRGDKTSRDMWATGSLPDFPAAAKFLGFRQRCIPRSLCLSECPLEPPSLTRLCATLKDCPGPLELQLSCEFLSDQSLETLLDCLPQLPQLSLLQLSQTGLSPKSPFLLANTLSLCPRVKKVDLRSLHHATLHFRSNEEEEGVCCGRFTGCSLSQEHVESLCWLLSKCKDLSQVDLSANLLGDSGLRCLLECLPQVPISGLLDLSHNSISQESALYLLETLPSCPRVREASVNLGSEQSFRIHFSREDQAGKTLRLSECSFRPEHVSRLATGLSKSLQLTELTLTQCCLGQKQLAILLSLVGRPAGLFSLRVQEPWADRARVLSLLEVCAQASGSVTEISISETQQQLCVQLEFPRQEENPEAVALRLAHCDLGAHHSLLVGQLMETCARLQQLSLSQVNLCEDDDASSLLLQSLLLSLSELKTFRIQSSQDPGRLLPDLLPFDPHQADLQLCEHRGPRPPGIWSGPLPPLGGAGLV

SEQ ID NO: 173 - protein, 1180 aa, Homo sapiens
  misc_feature (1)..(1): Xaa can be any naturally occurring amino acid
XHLNCFQALFLFEFRQLNLITRFLTPSELLFDLYLSPESDHDTVFQYLEKNADQVLLIFDGLDEALQPMGPDGPGPVLTLFSHLCNGTLLPGCRVMATSRPGKLPACLPAEAAMVHMLGFDGPRVEEYVNHFFSAQPSREGALVELQTNGRLRSLCAVPALCQVACLCLHHLLPDHAPGQSVALLPNMTQLYMQMVLALSPPGHLPTSSLLDLGEVALRGLETGKVIFYAKDIAPPLIAFGATHSLLTSFCVCTGPGHQQTGYAFTHLSLQEFLAALHLMASPKVNKDTLTQYVTLHSRWVQRTKARLGLSDHLPTFLAGLASCTCRPFLSHLAQGNEDCVGAKQAAVVQVLKKLATRKLTGPKVVELCHCVDETQEPELASLTAQSLPYQLPFHNFPLTCTDLATLTNILEHREAPIHLDFDGCPLEPHCPEALVGCGQIENLSFKSRKCGDAFAEALSRSLPTMGRLQMLGLAGSKITARGISHLVKALPLCPQLKEVSFRDNQLSDQVVLNIVEVLPHLPRLRKLDLSSNSICVSTLLCLARVAVTCPTVRMLQAREADLIFLLSPPTETTAELQRAPDLQESDGQRKGAQSRSLTLRLQKCQLQVHDAEALIALLQEGPHLEEVDLSGNQLEDEGCRLMAEAASQLHIARKLDLSNNGLSVAGVHCVLRAVSACWTLAELHISLQHKTVIFMFAQEPEEQKGPQERAAFLDSLMLQMPSELPLSSRRMRLTHCGLQEKHLEQLCKALGGSCHLGHLHLDFSGNALGDEGAARLAQLLPGLGALQSLNLSENGLSLDAVLGLVRCFSTLQWLFRLDISFESQHILLRGDKTSRDMWATGSLPDFPAAAKFLGFRQRCIPRSLCLSECPLEPPSLTRLCATLKDCPGPLELQLSCEFLSDQSLETLLDCLPQLPQLSLLQLSQTGLSPKSPFLLANTLSLCPRVKKVDLRSLHHATLHFRSNEEEEGVCCGFTGCSLSQEHVESLCWLLSKCKDLSQVDLSANLLGDSGLRCLLECLPQVPISGLLDLSHNSISQESALYLLETLPSCPRVREASVNLGSEQSFRIHFSREDQAGKTLRLSECSFRPEHVSRLATGLSKSLQLTELTLTQCCLGQKQLAILLSLVGRPAGLFSLRDSTRHTEKLSFPTLEACALGFKKKRKKERKKVSEDTELRTKIN

SEQ ID NO: 174 - protein, 885 aa, Homo sapiens
LTSFCVCTGPGHQQTGYAFTHLSLQEFLAALHLMASPKVNKDTLTQYVTLHSRWVQRTKARLGLSDHLPTFLAGLASCTCRPFLSHLAQGNEDCVGAKQAAVVQVLKKLATRKLTGPKVVELCHCVDETQEPELASLTAQSLPYQLPFHNFPLTCTDLATLTNILEHREAPIHLDFDGCPLEPHCPEALVGCGQIENLSFKSRKCGDAFAEALSRSLPTMGRLQMLGLAGSKITARGISHLVKALPLCPQLKEVSFRDNQLSDQVVLNIVEVLPHLPRLRKLDLSSNSICVSTLLCLARVAVTCPTVRMLQAREADLIFLLSPPTETTAELQRAPDLQESDGQRKGAQSRSLTLRLQKCQLQVHDAEALIALLQEGPHLEEVDLSGNQLEDEGCRLMAEAASQLHIARKLDLSNNGLSVAGVHCVLRAVSACWTLAELHISLQHKTVIFMFAQEPEEQKGPQERAAFLDSLMLQMPSELPLSSRRMRLTHCGLQEKHLEQLCKALGGSCHLGHLHLDFSGNALGDEGAARLAQLLPGLGALQSLNLSENGLSLDAVLGLVRCFSTLQWLFRLDISFESQHILLRGDKTSSLSECPLEPPSLTRLCATLKDCPGPLELQLSCEFLSDQSLETLLDCLPQLPQLSLLQLSQTGLSPKSPFLLANTLSLCPRVKKVDLRSLHHATLHFRSNEEEEGVCCGFTGCSLSQEHVESLCWLLSKCKDLSQVDLSANLLGDSGLRCLLECLPQVPISGLLDLSHNSISQESALYLLETLPSCPRVREASVNLGSEQSFRIHFSREDQAGKTLRLSECSFRPEHVSRLATGLSKSLQLTELTLTQCCLGQKQLAILLSLVGRPAGLFSLRDSTRHTEKLSFPTLEACALGFKKK

SEQ ID NO: 175 - protein, 325 aa, Homo sapiens
  misc_feature (1)..(1): Xaa can be any naturally occurring amino acid
XWLFRLDISFESQHILLRGDKTSRDMWATGSLPDFPAAAKFLGFRQRCIPRSLCLSECPLEPPSLTRLCATLKDCPGPLELQLSCEFLSDQSLETLLDCLPQLPQLSLLQLSQTGLSPKSPFLLANTLSLCPRVKKVDLRSLHHATLHFRSNEEEEGVCCGFTGCSLSQEHVESLCWLLSKCKDLSQVDLSANLLGDSGLRCLLECLPQVPISGLLDLSHNSISQESALYLLETLPSCPRVREASVNLGSEQSFRIHFSREDQAGKTLRLSECSFRPEHVSRLATGLSKSLQLTELTLTQCCLGQKQLAILLSLVGRPAGLFSLS

SEQ ID NO: 176 - protein, 720 aa, Homo sapiens
MDPVGLQLGNKNLWSCLVRLLTKDPEWLNAKMKFFLPNTDLDSRNETLDPEQRVILQLNKLHVQGSDTWQSFIHCVCMQLEVPLDLEVLLLSTFGYDDGFTSQLGAEGKSQPESQLHHGLKRPHQSCGSSPRRKQCKKQQLELAKKYLQLLRTSAQQRYRSQIPGSGQPHAFHQVYVPPILRRATASLDTPEGAIMGDVKVEDGADVSISDLFNTRVNKGPRVTVLLGKAGMGKTTLAHRLCQKWAEGHLNCFQALFLFEFRQLNLITRFLTPSELLFDLYLSPESDHDTVFQYLEKNADQVLLIFDGLDEALQPMGPDGPGPVLTLFSHLCNGTLLPGCRVMATSRPGKLPACLPAEAAMVHMLGFDGPRVEEYVNHFFSAQPSREGALVELQTNGRLRSLCAVPALCQVACLCLHHLLPDHAPGQSVALLPNMTQLYMQMVLALSPPGHLPTSSLLDLGEVALRGLETGKVIFYAKDIAPPLIAFGATHSLLTSFCVCTGPGHQQTGYAFTHLSLQEFLAALHLMASPKVNKDTLTQYVTLHSRWVQRTKARLGLSDHLPTFLAGLASCTCRPFLSHLAQGNEDCVGAKQAAVVQVLKKLATRKLTGPKVVELCHCVDETQEPELASLTAQSLPYQLPFHNFPLTCTDLATLTNILEHREAPIHLDFDGCPLEPHCPEALVGCGQIENLSFKSRKCGDAFAEALSRSLPTMGRLQMLG

SEQ ID NO: 177 - protein, 19 aa, Homo sapiens
MDPVGLQLGNKNLWSCLVR

SEQ ID NO: 178 - protein, 325 aa, Homo sapiens
MPITRMRMRPWLEMQINSNQIPGLIWINKEEMIFQIPWKHAAKHGWDINKDACLFRSWAIHTGRYKAGEKEPDPKTWKANFRCAMNSLPDIEEVKDQSRNKGSSAVRVYRMLPPLTKNQRKERKSKSSRDAKSKAKRKSCGDSSPDTFSDGLSSSTLPDDHSSYTVPGYMQDLEVEQALTPALSPCAVSSTLPDWHIPVEVVPDSTSDLYNFQVSPMPSTSEATTDEDEEGKLPEDIMKLLEQSEWQPTNVDGKGYLLNEPGVQPTSVYGDFSCKEEPEIDSPGGDIGLSLQRVFTDLKNMDATWLDSLLTPVRLPSIQAIPCAP

SEQ ID NO: 179 - protein, 192 aa, Homo sapiens
MPITRMRMRPWLEMQINSNQIPGLIWINKEEMIFQIPWKHAAKHGWDINKDACLFRSWAIHTGRYKAGEKEPDPKTWKANFRCAMNSLPDIEEVKDQSRNKGSSAVRVYRMLPPLTKNQRKERKSKSSRDAKSKAKRKSCGDSSPDTFSDGLSSSTLPDDHSSYTVPGYMQDLEVEQALTPALSPCAVSSTL

SEQ ID NO: 180 - protein, 198 aa, Homo sapiens
MPITRMRMRPWLEMQINSNQIPGLIWINKEEMIFQIPWKHAAKHGWDINKDACLFRSWAIHTGRYKAGEKEPDPKTWKANFRCAMNSLPDIEEVKDQSRNKGSSAVRVYRMLPPLTKNQRKERKSKSSRDAKSKAKRKSCGDSSPDTFSDGLSSSTLPDDHSSYTVPGYMQDLEVEQALTPATTDEDEEGKLPEDIMK

SEQ ID NO: 181 - protein, 51 aa, Homo sapiens
MPITRMRMRPWLEMQINSNQIPGLIWINKADTKQGKRSQIPRRGRPTFAVP

SEQ ID NO: 182 - protein, 118 aa, Homo sapiens
MPITRMRMRPWLEMQINSNQIPGLIWINKEEMIFQIPWKHAAKHGWDINKDACLFRSWAIHTGRYKAGEKEPDPKTWKANFRCAMNSLPDIEEVKDQSRNKGSSAVRVYRMLPPLTKN

SEQ ID NO: 183 - protein, 201 aa, Homo sapiens
MPITRMRMRPWLEMQINSNQIPGLIWINKEEMIFQIPWKHAAKHGWDINKDACLFRSWAIHTGRYKAGEKEPDPKTWKANFRCAMNSLPDIEEVKDQSRNKGSSAVRVYRMLPPLTKNQRKERKSKSSRDAKSKAKRKSCGDSSPDTFSDGLSSSTLPDDHSSYTVPGYMQDLEVEQALTPALGAVGVAANKRGWEGVPTQ

SEQ ID NO: 184 - protein, 2863 aa, Homo sapiens
MASEDNRVPSPPPTGDDGGGGGREETPTEGGALSLKPGLPIRGIRMKFAVLTGLVEVGEVSNRDIVETVFNLLVGGQFDLEMNFIIQEGESINCMVDLLEKCDITCQAEVWSMFTAILKKSIRNLQVCTEVGLVEKVLGKIEKVDNMIADLLVDMLGVLASYNLTVRELKLFFSKLQGDKGRWPPHAGKLLSVLKHMPQKYGPDAFFNFPGKSAAAIALPPIAKWPYQNGFTFHTWLRMDPVNNINVDKDKPYLYCFRTSKGLGYSAHFVGGCLIVTSIKSKGKGFQHCVKFDFKPQKWYMVTIVHIYNRWKNSELRCYVNGELASYGEITWFVNTSDTFDKCFLGSSETADANRVFCGQMTAVYLFSEALNAAQIFAIYQLGLGYKGTFKFKAESDLFLAEHHKLLLYDGKLSSAIAFTYNPRATDAQLCLESSPKDNPSIFVHSPHALMLQDVKAVLTHSIQSAMHSIGGVQVLFPLFAQLDYRQYLSDEIDLTICSTLLAFIMELLKNSIAMQEQMLACKGFLVIGYSLEKSSKSHVSRAVLELCLAFSKYLSNLQNGMPLLKQLCDHVLLNPAIWIHTPAKVQLMLYTYLSTEFIGTVNIYNTIRRVGTVLLIMHTLKYYYWAVNPQDRSGITPKGLDGPRPNQKEMLSLRAFLLMFIKQLVMKDSGVKEDELQAILNYLLTMHEDDNLMDVLQLLVALMSEHPNSMIPAFDQRNGLRVIYKLLASKSEGIRVQALKAMGYFLKHLAPKRKAEVMLGHGLFSLLAERLMLQTNLITMTTYNVLFEILIEQIGTQVIHKQHPDPDSSVKIQNPQILKVIATLLRNSPQCPESMEVRRAFLSDMIKLFNNSRENRRSLLQCSVWQEWMLSLCYFNPKNSDEQKITEMVYAIFRILLYHAVKYEWGGWRVWVDTLSITHSKVTFEIHKENLANIFREQQGKVDEEIGLCSSTSVQAASGIRRDINVSVGSQQPDTKDSPVCPHFTTNGNENSSIEKTSSLESASNIELQTTNTSYEEMKAEQENQELPDEGTLEETLTNETRNADDLEVSSDIIEAVAISSNSFITTGKDSMTVSEVTASISSPSEEDASEMPEFLDKSIVEEEEDDDYVELKVEGSPTEEANLPTELQDNSLSPAASEAGEKLDMFGNDDKLIFQEGKPVTEKQTDTETQDSKDSGIQTMTASGSSAMSPETTVSQIAVESDLGQMLEEGKKATNLTRETKLINDCHGSVSEASSEQKIAKLDVSNVATDTERLELKASPNVEAPQPHRHVLEISRQHEQPGQGIAPDAVNGQRRDSRSTVFRIPEFNWSQMHQRLLTDLLFSIETDIQMWRSHSTKTVMDFVNSSDNVIFVHNTIHLISQVMDNMVMACGGILPLLSAATSATHELENIEPTQGLSIEASVTFLQRLISLVDVLIFASSLGFTEIEAEKSMSSGGILRQCLRLVCAVAVRNCLECQQHSQLKTRGDKALKPMHSLIPLGKSAAKSPVDIVTGGISPVRDLDRLLQDMDINRLRAVVFRDIEDSKQAQFLALAVVYFISVLMVSKYRDILEPQNERHSQSCTETGSENENVSLSEITPAAFSTLTTASVEESESTSSARRRDSGIGEETATGLGSHVEVTPHTAPPGVSAGPDAISEVLSTLSLEVNKSPETKNDRGNDLDTKATPSVSVSKNVNVKDILRSLVNIPADGVTVDPALLPPACLGALGDLSVEQPVQFRSFDRSVIVAAKKSAVSPSTFNTSIPTNAVSVVSSVDSAQASDMGGESPGSRSSNAKLPSVPTVDSVSQDPVSNMSITERLEHALEKAAPLLREIFVDFAPFLSRTLLGSHGQELLIEGTSLVCMKSSSSVVELVMLLCSQEWQNSIQKNAGLAFIELVNEGRLLSQTMKDHLVRVANEAEFILSRQRAEDIHRHAEFESLCAQYSADKREDEKMCDHLIRAAKYRDHVTATQLIQKIINILTDKHGAWGNSAVSRPLEFWRLDYWEDDLRRRRRFVRNPLGSTHPEATLKTAVEHVCIFKLRENSKATDEDILAKGKQSIRSQALGNQNSENEILLEGDDDTLSSVDEKDLENLAGPVSLSTPAQLVAPSVVVKGTLSVTSSELYFEVDEEDPNFKKIDPKILAYTEGLHGKWLFTEIRSIFSRRYLLQNTALEIFMANRVAVMFNFPDPATVKKVVNYLPRVGVGTSFGLPQTRRISLASPRQLFKASNMTQRWQHREISNFEYLMFLNTIAGRSYNDLNQYPVFPWVITNYESEELDLTLPTNFRDLSKPIGALNPKRAAFFAERYESWEDDQVPKFHYGTHYSTASFVLAWLLRIEPFTTYFLNLQGGKFDHADRTFSSISRAWRNSQRDTSDIKELIPEFYYLPEMFVNFNNYNLGVMDDGTVVSDVELPPWAKTSEEFVHINRLALESEFVSCQLHQWIDLIFGYKQQGPEAVRALNVFYYLTYEGAVNLNSITDPVLREAVEAQIRSFGQTPSQLLIEPHPPRGSAMQVSPLMFTDKAQQDVIMVLKFPSNSPVTHVAANTQPGLATPAVITVTANRLFAVNKWHNLPAHQGAVQDQPYQLPVEIDPLIASNTGMHRRQITDLLDQSIQVHSQCFVITSDNRYILVCGFWDKSFRVYSTDTGRLIQVVFGHWDVVTCLARSESYIGGNCYILSGSRDATLLLWYWNGKCSGIGDNPGSETAAPRAILTGHDYEVTCAAVCAELGLVLSGSQEGPCLIHSMNGDLLRTLEGPENCLKPKLIQASREGHCVIFYENGLFCTFSVNGKLQATMETDDNIRAIQLSRDGQYLLTGGDRGVVVVRQVSDLKQLFAYPGCDAGIRAMALSYDQRCIISGMASGSIVLFYNDFNRWHHEYQTRY

SEQ ID NO: 185 - protein, 134 aa, Homo sapiens
GFTEIEAEKSMSSGGILRQCLRLVCAVAVRNCLECQQHSQLKTRGDKALKPMHSLIPLGKSAAKSPVDIVTGGISPVRDLDRLLQDMDINRLRAVVFRDITKKSLHMNLQNIIDFVRSRITNMSKNCIKWICSN

SEQ ID NO: 186 - protein, 2575 aa, Homo sapiens
MASEDNRVPSPPPTGDDGGGGGREETPTEGGALSLKPGLPIRGIRMKFAVLTGLVEVGEVSNRDIVETVFNLLVGGQFDLEMNFIIQEGESINCMVDLLEKCDITCQAEVWSMFTAILKKSIRNLQVCTEVGLVEKVLGKIEKVDNMIADLLVDMLGVLASYNLTVRELKLFFSKLQGDKGRWPPHAGKLLSVLKHMPQKYGPDAFFNFPGKSAAAIALPPIAKWPYQNGFTFHTWLRMDPVNNINVDKDKPYLYCFRTSKGLGYSAHFVGGCLIVTSIKSKGKGFQHCVKFDFKPQKWYMVTIVHIYNRWKNSELRCYVNGELASYGEITWFVNTSDTFDKCFLGSSETADANRVFCGQMTAVYLFSEALNAAQIFAIYQLGLGYKGTFKFKAESDLFLAEHHKLLLYDGKLSSAIAFTYNPRATDAQLCLESSPKDNPSIFVHSPHALMLQDVKAVLTHSIQSAMHSIGGVQVLFPLFAQLDYRQYLSDEIDLTICSTLLAFIMELLKNSIAMQEQMLACKGFLVIGYSLEKSSKSHVSRAVLELCLAFSKYLSNLQNGMPLLKQLCDHVLLNPAIWIHTPAKVQLMLYTYLSTEFIGTVNIYNTIRRVGTVLLIMHTLKYYYWAVNPQDRSGITPKGLDGPRPNQKEMLSLRAFLLMFIKQLVMKDSGVKEDELQAILNYLLTMHEDDNLMDVLQLLVALMSEHPNSMIPAFDQRNGLRVIYKLLASKSEGIRVQALKAMGYFLKHLAPKRKAEVMLGHGLFSLLAERLMLQTNLITMTTYNVLFEILIEQIGTQVIHKQHPDPDSSVKIQNPQILKVIATLLRNSPQCPESMEVRRAFLSDMIKLFNNSRENRRSLLQCSVWQEWMLSLCYFNPKNSDEQKITEMVYAIFRILLYHAVKYEWGGWRVWVDTLSITHSKVTFEIHKENLANIFREQQGKVDEEIGLCSSTSVQAASGIRRDINVSVGSQQPDTKDSPVCPHFTTNGNENSSIEKTSSLESASNIELQTTNTSYEEMKAEQENQELPDEGTLEETLTNETRNADDLEVSSDIIEAVAISSNSFITTGKDSMTVSEVTASISSPSEEDASEMPEFLDKSIVEEEEDDDYVELKVEGSPTEEANLPTELQDNSLSPAASEAGEKLDMFGNDDKLIFQEGKPVTEKQTDTETQDSKDSGIQTMTASGSSAMSPETTVSQIAVESDLGQMLEEGKKATNLTRETKLINDCHGSVSEASSEQKIAKLDVSNVATDTERLELKASPNVEAPQPHRHVLEISRQHEQPGQGIAPDAVNGQRRDSRSTVFRIPEFNWSQMHQRLLTDLLFSIETDIQMWRSHSTKTVMDFVNSSDNVIFVHNTIHLISQVMDNMVMACGGILPLLSAATSATHELENIEPTQGLSIEASVTFLQRLISLVDVLIFASSLGFTEIEAEKSMSSGGILRQCLRLVCAVAVRNCLECQQHSQLKTRGDKALKPMHSLIPLGKSAAKSPVDIVTGGISPVRDLDRLLQDMDINRLRAVVFRDIEDSKQAQFLALAVVYFISVLMVSKYRDILEPQNERHSQSCTETGSENENVSLSEITPAAFSTLTTASVEESESTSSARRRDSGIGEETATGLGSHVEVTPHTAPPGVSAGPDAISEVLSTLSLEVNKSPETKNDRGNDLDTKATPSVSVSKNVNVKDILRSLVNIPADGVTVDPALLPPACLGALGDLSVEQPVQFRSFDRSVIVAAKKSAVSPSTFNTSIPTNAVSVVSSVDSAQASDMGGESPGSRSSNAKLPSVPTVDSVSQDPVSNMSITERLEHALEKAAPLLREIFVDFAPFLSRTLLGSHGQELLIEGTSLVCMKSSSSVVELVMLLCSQEWQNSIQKNAGLAFIELVNEGRLLSQTMKDHLVRVANEAEFILSRQRAEDIHRHAEFESLCAQYSADKREDEKMCDHLIRAAKYRDHVTATQLIQKIINILTDKHGAWGNSAVSRPLEFWRLDYWEDDLRRRRRFVRNPLGSTHPEATLKTAVEHATDEDILAKGKQSIRSQALGNQNSENEILLEGDDDTLSSVDEKDLENLAGPVSLSTPAQLVAPSVVVKGTLSVTSSELYFEVDEEDPNFKKIDPKILAYTEGLHGKWLFTEIRSIFSRRYLLQNTALEIFMANRVAVMFNFPDPATVKKVVNYLPRVGVGTSFGLPQTRRISLASPRQLFKASNMTQRWQHREISNFEYLMFLNTIAGRSYNDLNQYPVFPWVITNYESEELDLTLPTNFRDLSKPIGALNPKRAAFFAERYESWEDDQVPKFHYGTHYSTASFVLAWLLRIEPFTTYFLNLQGGKFDHADRTFSSISRAWRNSQRDTSDIKELIPEFYYLPEMFVNFNNYNLGVMDDGTVVSDVELPPWAKTSEEFVHINRLALESEFVSCQLHQWIDLIFGYKQQGPEAVRALNVFYYLTYEGAVNLNSITDPVLREAVEAQIRSFGQTPSQLLIEPHPPRGSAMQVSPLMFTDKAQQDVIMVLKFPSNSPVTHVAANTQPGLATPAVITVTANRLFAVNKWHNLPAHQGAVQDQPYQLPVEIDPLIGLSLPSLFAIH

SEQ ID NO: 187 - protein, 147 aa, Homo sapiens
  misc_feature (1)..(1): Xaa can be any naturally occurring amino acid
XYILSGSRDATLLLWYWNGKCSGIGDNPGSETAAPRAILTGHDYEVTCAAVCAELGLVLSGSQEGPCLIHSMNGDLLRTLEGPENCLKPKLIQASREGHCVIFYENGLFCTFSVNGKLQATMETDDNIRVHHFWHGFRKHCAILQRL

SEQ ID NO: 188 - protein, 1505 aa, Homo sapiens
  misc_feature (1)..(1): Xaa can be any naturally occurring amino acid
XDNVIFVHNTIHLISQVMDNMVMACGGILPLLSAATSATHELENIEPTQGLSIEASVTFLQRLISLVDVLIFASSLGFTEIEAEKSMSSGGILRQCLRLVCAVAVRNCLECQQHSQLKTRGDKALKPMHSLIPLGKSAAKSPVDIVTGGISPVRDLDRLLQDMDINRLRAVVFRDIEDSKQAQFLALAVVYFISVLMVSKYRDILEPQNERHSQSCTETGSENENVSLSEITPAAFSTLTTASVEESESTSSARRRDSGIGEETATGLGSHVEVTPHTAPPGVSAGPDAISEVLSTLSLEVNKSPETKNDRGNDLDTKATPSVSVSKNVNVKDILRSLVNIPADGVTVDPALLPPACLGALGDLSVEQPVQFRSFDRSVIVAAKKSAVSPSTFNTSIPTNAVSVVSSVDSAQASDMGGESPGSRSSNAKLPSVPTVDSVSQDPVSNMSITERLEHALEKAAPLLREIFVDFAPFLSRTLLGSHGQELLIEGTSLVCMKSSSSVVELVMLLCSQEWQNSIQKNAGLAFIELVNEGRLLSQTMKDHLVRVANEAEFILSRQRAEDIHRHAEFESLCAQYSADKREDEKMCDHLIRAAKYRDHVTATQLIQKIINILTDKHGAWGNSAVSRPLEFWRLDYWEDDLRRRRRFVRNPLGSTHPEATLKTAVEHATDEDILAKGKQSIRSQALGNQNSENEILLEGDDDTLSSVDEKDLENLAGPVSLSTPAQLVAPSVVVKGTLSVTSSELYFEVDEEDPNFKKIDPKILAYTEGLHGKWLFTEIRSIFSRRYLLQNTALEIFMANRVAVMFNFPDPATVKKVVNYLPRVGVGTSFGLPQTRRISLASPRQLFKASNMTQRWQHREISNFEYLMFLNTIAGRSYNDLNQYPVFPWVITNYESEELDLTLPTNFRDLSKPIGALNPKRAAFFAERYESWEDDQVPKFHYGTHYSTASFVLAWLLRIEPFTTYFLNLQGGKFDHADRTFSSISRAWRNSQRDTSDIKELIPEFYYLPEMFVNFNNYNLGVMDDGTVVSDVELPPWAKTSEEFVHINRLALESEFVSCQLHQWIDLIFGYKQQGPEAVRALNVFYYLTYEGAVNLNSITDPVLREAVEAQIRSFGQTPSQLLIEPHPPRGSAMQVSPLMFTDKAQQDVIMVLKFPSNSPVTHVAANTQPGLATPAVITVTANRLFAVNKWHNLPAHQGAVQDQPYQLPVEIDPLIASNTGMHRRQITDLLDQSIQVHSQCFVITSDNRYILVCGFWDKSFRVYSTDTGRLIQVVFGHWDVVTCLARSESYIGGNCYILSGSRDATLLLWYWNGKCSGIGDNPGSETAAPRAILTGHDYEVTCAAVCAELGLVLSGSQEGPCLIHSMNGDLLRTLEGPENCLKPKLIQASREGHCVIFYENGLFCTFSVNGKLQATMETDDNIRAIQLSRDGQYLLTGGDRGVVVVRQVSDLKQLFAYPGCDAGIRAMALSYDQRCIISGMASGSIVLFYNDFNRWHHEYQTRY

SEQ ID NO: 189 - protein, 1880 aa, Homo sapiens
MASEDNRVPSPPPTGDDGGGGGREETPTEGGALSLKPGLPIRGIRMKFAVLTGLVEVGEVSNRDIVETVFNLLVGGQFDLEMNFIIQEGESINCMVDLLEKCDITCQAEVWSMFTAILKKSIRNLQVCTEVGLVEKVLGKIEKVDNMIADLLVDMLGVLASYNLTVRELKLFFSKLQGDKGRWPPHAGKLLSVLKHMPQKYGPDAFFNFPGKSAAAIALPPIAKWPYQNGFTFHTWLRMDPVNNINVDKDKPYLYCFRTSKGLGYSAHFVGGCLIVTSIKSKGKGFQHCVKFDFKPQKWYMVTIVHIYNRWKNSELRCYVNGELASYGEITWFVNTSDTFDKCFLGSSETADANRVFCGQMTAVYLFSEALNAAQIFAIYQLGLGYKGTFKFKAESDLFLAEHHKLLLYDGKLSSAIAFTYNPRATDAQLCLESSPKDNPSIFVHSPHALMLQDVKAVLTHSIQSAMHSIGGVQVLFPLFAQLDYRQYLSDEIDLTICSTLLAFIMELLKNSIAMQEQMLACKGFLVIGYSLEKSSKSHVSRAVLELCLAFSKYLSNLQNGMPLLKQLCDHVLLNPAIWIHTPAKVQLMLYTYLSTEFIGTVNIYNTIRRVGTVLLIMHTLKYYYWAVNPQDRSGITPKGLDGPRPNQKEMLSLRAFLLMFIKQLVMKDSGVKEDELQAILNYLLTMHEDDNLMDVLQLLVALMSEHPNSMIPAFDQRNGLRVIYKLLASKSEGIRVQALKAMGYFLKHLAPKRKAEVMLGHGLFSLLAERLMLQTNLITMTTYNVLFEILIEQIGTQVIHKQHPDPDSSVKIQNPQILKVIATLLRNSPQCPESMEVRRAFLSDMIKLFNNSRENRRSLLQCSVWQEWMLSLCYFNPKNSDEQKITEMVYAIFRILLYHAVKYEWGGWRVWVDTLSITHSKVTFEIHKENLANIFREQQGKVDEEIGLCSSTSVQAASGIRRDINVSVGSQQPDTKDSPVCPHFTTNGNENSSIEKTSSLESASNIELQTTNTSYEEMKAEQENQELPDEGTLEETLTNETRNADDLEVSSDIIEAVAISSNSFITTGKDSMTVSEVTASISSPSEEDASEMPEFLDKSIVEEEEDDDYVELKVEGSPTEEANLPTELQDNSLSPAASEAGEKLDMFGNDDKLIFQEGKPVTEKQTDTETQDSKDSGIQTMTASGSSAMSPETTVSQIAVESDLGQMLEEGKKATNLTRETKLINDCHGSVSEASSEQKIAKLDVSNVATDTERLELKASPNVEAPQPHRHVLEISRQHEQPGQGIAPDAVNGQRRDSRSTVFRIPEFNWSQMHQRLLTDLLFSIETDIQMWRSHSTKTVMDFVNSSDNVIFVHNTIHLISQVMDNMVMACGGILPLLSAATSATHELENIEPTQGLSIEASVTFLQRLISLVDVLIFASSLGFTEIEAEKSMSSGGILRQCLRLVCAVAVRNCLECQQHSQLKTRGDKALKPMHSLIPLGKSAAKSPVDIVTGGISPVRDLDRLLQDMDINRLRAVVFRDIEDSKQAQFLALAVVYFISVLMVSKYRDILEPQNERHSQSCTETGSENENVSLSEITPAAFSTLTTASVEESESTSSARRRDSGIGEETATGLGSHVEVTPHTAPPGVSAGPDAISEVLSTLSLEVNKSPETKNDRGNDLDTKATPSVSVSKNVNVKDILRSLVNIPADGVTVDPALLPPACLGALGDLSVEQPVQFRSFDRSVIVAAKKSAVSPSTFNTSIPTNAVSVVSSVDSAQASDMGGESPGSRSSNAKLPSVPTVDSVSQDPVSNMSITERLEHALEKAAPLLREIFVDFAPFLSRTLLGSHGQELLIEGTSLVCMKSSSSVVELVMLLCSQVRVAKFYSEECRPCFYRTCQ

SEQ ID NO: 190 - protein, 686 aa, Homo sapiens
GTSFGLPQTRRISLASPRQLFKASNMTQRWQHREISNFEYLMFLNTIAGRSYNDLNQYPVFPWVITNYESEELDLTLPTNFRDLSKPIGALNPKRAAFFAERYESWEDDQVPKFHYGTHYSTASFVLAWLLRIEPFTTYFLNLQGGKFDHADRTFSSISRAWRNSQRDTSDIKELIPEFYYLPEMFVNFNNYNLGVMDDGTVVSDVELPPWAKTSEEFVHINRLALESEFVSCQLHQWIDLIFGYKQQGPEAVRALNVFYYLTYEGAVNLNSITDPVLREAVEAQIRSFGQTPSQLLIEPHPPRGSAMQVYLLLQSPLMFTDKAQQDVIMVLKFPSNSPVTHVAANTQPGLATPAVITVTANRLFAVNKWHNLPAHQGAVQDQPYQLPVEIDPLIASNTGMHRRQITDLLDQSIQVHSQCFVITSDNRYILVCGFWDKSFRVYSTDTGRLIQVVFGHWDVVTCLARSESYIGGNCYILSGSRDATLLLWYWNGKCSGIGDNPGSETAAPRAILTGHDYEVTCAAVCAELGLVLSGSQEGPCLIHSMNGDLLRTLEGPENCLKPKLIQASREGHCVIFYENGLFCTFSVNGKLQATMETDDNIRAIQLSRDGQYLLTGGDRGVVVVRQVSDLKQLFAYPGCDAGIRAMALSYDQRRPRSLQKFLSSVISVHHFWHGFRKHCAILQRL

SEQ ID NO: 191 - protein, 2095 aa, Homo sapiens
GLFSLLAERLMLQTNLITMTTYNVLFEILIEQIGTQVIHKQHPDPDSSVKIQNPQILKVIATLLRNSPQCPESMEVRRAFLSDMIKLFNNSRENRRSLLQCSVWQEWMLSLCYFNPKNSDEQKITEMVYAIFRILLYHAVKYEWGGWRVWVDTLSITHSKVTFEIHKENLANIFREQQGKVDEEIGLCSSTSVQAASGIRRDINVSVGSQQPDTKDSPVCPHFTTNGNENSSIEKTSSLESASNIELQTTNTSYEEMKAEQENQELPDEGTLEETLTNETRNADDLEVSSDIIEAVAISSNSFITTGKDSMTVSEVTASISSPSEEDASEMPEFLDKSIVEEEEDDDYVELKVEGSPTEEANLPTELQDNSLSPAASEAGEKLDMFGNDDKLIFQEGKPVTEKQTDTETQDSKDSGIQTMTASGSSAMSPETTVSQIAVESDLGQMLEEGKKATNLTRETKLINDCHGSVSEASSEQKIAKLDVSNVATDTERLELKASPNVEAPQPHRHVLEISRQHEQPGQGIAPDAVNGQRRDSRSTVFRIPEFNWSQMHQRLLTDLLFSIETDIQMWRSHSTKTVMDFVNSSDNVIFVHNTIHLISQVMDNMVMACGGILPLLSAATSATHELENIEPTQGLSIEASVTFLQRLISLVDVLIFASSLGFTEIEAEKSMSSGGILRQCLRLVCAVAVRNCLECQQHSQLKTRGDKALKPMHSLIPLGKSAAKSPVDIVTGGISPVRDLDRLLQDMDINRLRAVVFRDIEDSKQAQFLALAVVYFISVLMVSKYRDILEPQNERHSQSCTETGSENENVSLSEITPAAFSTLTTASVEESESTSSARRRDSGIGEETATGLGSHVEVTPHTAPPGVSAGPDAISEVLSTLSLEVNKSPETKNDRGNDLDTKATPSVSVSKNVNVKDILRSLVNIPADGVTVDPALLPPACLGALGDLSVEQPVQFRSFDRSVIVAAKKSAVSPSTFNTSIPTNAVSVVSSVDSAQASDMGGESPGSRSSNAKLPSVPTVDSVSQDPVSNMSITERLEHALEKAAPLLREIFVDFAPFLSRTLLGSHGQELLIEGTSLVCMKSSSSVVELVMLLCSQEWQNSIQKNAGLAFIELVNEGRLLSQTMKDHLVRVANEAEFILSRQRAEDIHRHAEFESLCAQYSADKREDEKMCDHLIRAAKYRDHVTATQLIQKIINILTDKHGAWGNSAVSRPLEFWRLDYWEDDLRRRRRFVRNPLGSTHPEATLKTAVEHATDEDILAKGKQSIRSQALGNQNSENEILLEGDDDTLSSVDEKDLENLAGPVSLSTPAQLVAPSVVVKGTLSVTSSELYFEVDEEDPNFKKIDPKILAYTEGLHGKWLFTEIRSIFSRRYLLQNTALEIFMANRVAVMFNFPDPATVKKVVNYLPRVGVGTSFGLPQTRRISLASPRQLFKASNMTQRWQHREISNFEYLMFLNTIAGRSYNDLNQYPVFPWVITNYESEELDLTLPTNFRDLSKPIGALNPKRAAFFAERYESWEDDQVPKFHYGTHYSTASFVLAWLLRIEPFTTYFLNLQGGKFDHADRTFSSISRAWRNSQRDTSDIKELIPEFYYLPEMFVNFNNYNLGVMDDGTVVSDVELPPWAKTSEEFVHINRLALESEFVSCQLHQWIDLIFGYKQQGPEAVRALNVFYYLTYEGAVNLNSITDPVLREAVEAQIRSFGQTPSQLLIEPHPPRGSAMQVYLLLQSPLMFTDKAQQDVIMVLKFPSNSPVTHVAANTQPGLATPAVITVTANRLFAVNKWHNLPAHQGAVQDQPYQLPVEIDPLIASNTGMHRRQITDLLDQSIQVHSQCFVITSDNRYILVCGFWDKSFRVYSTDTGRLIQVVFGHWDVVTCLARSESYIGGNCYILSGSRDATLLLWYWNGKCSGIGDNPGSETAAPRAILTGHDYEVTCAAVCAELGLVLSGSQEGPCLIHSMNGDLLRTLEGPENCLKPKLIQASREGHCVIFYENGLFCTFSVNGKLQATMETDDNIRAIQLSRDGQYLLTGGDRGVVVVRQVSDLKQLFAYPGCDAGIRAMALSYDQRCIISGMASGSIVLFYNDFNRWHHEYQTRY

SEQ ID NO: 192 - protein, 238 aa, Homo sapiens [sequence omitted]

SEQ ID NO: 193 - protein, 2851 aa, Homo sapiens
MASEDNRVPSPPPTGDDGGGGGREETPTEGGALSLKPGLPIRGIRMKFAVLTGLVEVGEVSNRDIVETVFNLLVGGQFDLEMNFIIQEGESINCMVDLLEKCDITCQAEVWSMFTAILKKSIRNLQVCTEVGLVEKVLGKIEKVDNMIADLLVDMLGVLASYNLTVRELKLFFSKLQGDKGRWPPHAGKLLSVLKHMPQKYGPDAFFNFPGKSAAAIALPPIAKWPYQNGFTFHTWLRMDPVNNINVDKDKPYLYCFRTSKGLGYSAHFVGGCLIVTSIKSKGKGFQHCVKFDFKPQKWYMVTIVHIYNRWKNSELRCYVNGELASYGEITWFVNTSDTFDKCFLGSSETADANRVFCGQMTAVYLFSEALNAAQIFAIYQLGLGYKGTFKFKAESDLFLAEHHKLLLYDGKLSSAIAFTYNPRATDAQLCLESSPKDNPSIFVHSPHALMLQDVKAVLTHSIQSAMHSIGGVQVLFPLFAQLDYRQYLSDEIDLTICSTLLAFIMELLKNSIAMQEQMLACKGFLVIGYSLEKSSKSHVSRAVLELCLAFSKYLSNLQNGMPLLKQLCDHVLLNPAIWIHTPAKVQLMLYTYLSTEFIGTVNIYNTIRRVGTVLLIMHTLKYYYWAVNPQDRSGITPKGLDGPRPNQKEMLSLRAFLLMFIKQLVMKDSGVKEDELQAILNYLLTMHEDDNLMDVLQLLVALMSEHPNSMIPAFDQRNGLRVIYKLLASKSEGIRVQALKAMGYFLKHLAPKRKAEVMLGHGLFSLLAERLMLQTNLITMTTYNVLFEILIEQIGTQVIHKQHPDPDSSVKIQNPQILKVIATLLRNSPQCPESMEVRRAFLSDMIKLFNNSRENRRSLLQCSVWQEWMLSLCYFNPKNSDEQKITEMVYAIFRILLYHAVKYEWGGWRVWVDTLSITHSKVTFEIHKENLANIFREQQGKVDEEIGLCSSTSVQAASGIRRDINVSVGSQQPDTKDSPVCPHFTTNGNENSSIEKTSSLESASNIELQTTNTSYEEMKAEQENQELPDEGTLEETLTNETRNADDLEVSSDIIEAVAISSNSFITTGKDSMTVSEVTASISSPSEEDASEMPEFLDKSIVEEEEDDDYVELKVEGSPTEEANLPTELQDNSLSPAASEAGEKLDMFGNDDKLIFQEGKPVTEKQTDTETQDSKDSGIQTMTASGSSAMSPETTVSQIAVESDLGQMLEEGKKATNLTRETKLINDCHGSVSEASSEQKIAKLDVSNVATDTERLELKASPNVEAPQPHRHVLEISRQHEQPGQGIAPDAVNGQRRDSRSTVFRIPEFNWSQMHQRLLTDLLFSIETDIQMWRSHSTKTVMDFVNSSDNVIFVHNTIHLISQVMDNMVMACGGILPLLSAATSATHELENIEPTQGLSIEASVTFLQRLISLVDVLIFASSLGFTEIEAEKSMSSGGILRQCLRLVCAVAVRNCLECQQHSQLKTRGDKALKPMHSLIPLGKSAAKSPVDIVTGGISPVRDLDRLLQDMDINRLRAVVFRDIEDSKQAQFLALAVVYFISVLMVSKYRDILEPQNERHSQSCTETGSENENVSLSEITPAAFSTLTTASVEESESTSSARRRDSGIGEETATGLGSHVEVTPHTAPPGVSAGPDAISEVLSTLSLEVNKSPETKNDRGNDLDTKATPSVSVSKNVNVKDILRSLVNIPADGVTVDPALLPPACLGALGDLSVEQPVQFRSFDRSVIVAAKKSAVSPSTFNTSIPTNAVSVVSSVDSAQASDMGGESPGSRSSNAKLPSVPTVDSVSQDPVSNMSITERLEHALEKAAPLLREIFVDFAPFLSRTLLGSHGQELLIEGTSLVCMKSSSSVVELVMLLCSQEWQNSIQKNAGLAFIELVNEGRLLSQTMKDHLVRVANEAEFILSRQRAEDIHRHAEFESLCAQYSADKREDEKMCDHLIRAAKYRDHVTATQLIQKIINILTDKHGAWGNSAVSRPLEFWRLDYWEDDLRRRRRFVRNPLGSTHPEATLKTAVEHATDEDILAKGKQSIRSQALGNQNSENEILLEGDDDTLSSVDEKDLENLAGPVSLSTPAQLVAPSVVVKGTLSVTSSELYFEVDEEDPNFKKIDPKILAYTEGLHGKWLFTEIRSIFSRRYLLQNTALEIFMANRVAVMFNFPDPATVKKVVNYLPRVGVGTSFGLPQTRRISLASPRQLFKASNMTQRWQHREISNFEYLMFLNTIAGRSYNDLNQYPVFPWVITNYESEELDLTLPTNFRDLSKPIGALNPKRAAFFAERYESWEDDQVPKFHYGTHYSTASFVLAWLLRIEPFTTYFLNLQGGKFDHADRTFSSISRAWRNSQRDTSDIKELIPEFYYLPEMFVNFNNYNLGVMDDGTVVSDVELPPWAKTSEEFVHINRLALESEFVSCQLHQWIDLIFGYKQQGPEAVRALNVFYYLTYEGAVNLNSITDPVLREAVEAQIRSFGQTPSQLLIEPHPPRGSAMQVSPLMFTDKAQQDVIMVLKFPSNSPVTHVAANTQPGLATPAVITVTANRLFAVNKWHNLPAHQGAVQDQPYQLPVEIDPLIASNTGMHRRQITDLLDQSIQVHSQCFVITSDNRYILVCGFWDKSFRVYSTDTGRLIQVVFGHWDVVTCLARSESYIGGNCYILSGSRDATLLLWYWNGKCSGIGDNPGETAAPRAILTGHDYEVTCAAVCAELGLVLSGSQEGPCLIHSMNGDLLRTLEGPENCLKPKLIQASREGHCVIFYENGLFCTFSVNGKLQATMETDDNIRAIQLSRDGQYLLTGGDRGVVVVRQVSDLKQLFAYPGCDAGIRAMALSYDQRCIISGMASGSIVLFYNDFNRWHHEYQTRY

SEQ ID NO: 194 - protein, 242 aa, Homo sapiens
  misc_feature (1)..(1): Xaa can be any naturally occurring amino acid
XTVKKVVNYLPRVGVGTSFGLPQTRRISLASPRQLFKASNMTQRWQHREISNFEYLMFLNTIAGRSYNDLNQYPVFPWVITNYESEELDLTLPTNFRDLSKPIGALNPKRAAFFAERYESWEDDQVPKFHYGTHYSTASFVLAWLLRIEPFTTYFLNLQGGKFDHADRTFSSISRAWRNSQRDTSDIKELIPEFYYLPEMFVNFNNYNLGVMDDGTVVSDVELPPWAKTSEEFVHINRLVPF

SEQ ID NO: 195 - protein, 2852 aa, Homo sapiens
MASEDNRVPSPPPTGDDGGGGGREETPTEGGALSLKPGLPIRGIRMKFAVLTGLVEVGEVSNRDIVETVFNLLVGGQFDLEMNFIIQEGESINCMVDLLEKCDITCQAEVWSMFTAILKKSIRNLQVCTEVGLVEKVLGKIEKVDNMIADLLVDMLGVLASYNLTVRELKLFFSKLQGDKGRWPPHAGKLLSVLKHMPQKYGPDAFFNFPGKSAAAIALPPIAKWPYQNGFTFHTWLRMDPVNNINVDKDKPYLYCFRTSKGLGYSAHFVGGCLIVTSIKSKGKGFQHCVKFDFKPQKWYMVTIVHIYNRWKNSELRCYVNGELASYGEITWFVNTSDTFDKCFLGSSETADANRVFCGQMTAVYLFSEALNAAQIFAIYQLGLGYKGTFKFKAESDLFLAEHHKLLLYDGKLSSAIAFTYNPRATDAQLCLESSPKDNPSIFVHSPHALMLQDVKAVLTHSIQSAMHSIGGVQVLFPLFAQLDYRQYLSDEIDLTICSTLLAFIMELLKNSIAMQEQMLACKGFLVIGYSLEKSSKSHVSRAVLELCLAFSKYLSNLQNGMPLLKQLCDHVLLNPAIWIHTPAKVQLMLYTYLSTEFIGTVNIYNTIRRVGTVLLIMHTLKYYYWAVNPQDRSGITPKGLDGPRPNQKEMLSLRAFLLMFIKQLVMKDSGVKEDELQAILNYLLTMHEDDNLMDVLQLLVALMSEHPNSMIPAFDQRNGLRVIYKLLASKSEGIRVQALKAMGYFLKHLAPKRKAEVMLGHGLFSLLAERLMLQTNLITMTTYNVLFEILIEQIGTQVIHKQHPDPDSSVKIQNPQILKVIATLLRNSPQCPESMEVRRAFLSDMIKLFNNSRENRRSLLQCSVWQEWMLSLCYFNPKNSDEQKITEMVYAIFRILLYHAVKYEWGGWRVWVDTLSITHSKVTFEIHKENLANIFREQQGKVDEEIGLCSSTSVQAASGIRRDINVSVGSQQPDTKDSPVCPHFTTNGNENSSIEKTSSLESASNIELQTTNTSYEEMKAEQENQELPDEGTLEETLTNETRNADDLEVSSDIIEAVAISSNSFITTGKDSMTVSEVTASISSPSEEDASEMPEFLDKSIVEEEEDDDYVELKVEGSPTEEANLPTELQDNSLSPAASEAGEKLDMFGNDDKLIFQEGKPVTEKQTDTETQDSKDSGIQTMTASGSSAMSPETTVSQIAVESDLGQMLEEGKKATNLTRETKLINDCHGSVSEASSEQKIAKLDVSNVATDTERLELKASPNVEAPQPHRHVLEISRQHEQPGQGIAPDAVNGQRRDSRSTVFRIPEFNWSQMHQRLLTDLLFSIETDIQMWRSHSTKTVMDFVNSSDNVIFVHNTIHLISQVMDNMVMACGGILPLLSAATSATHELENIEPTQGLSIEASVTFLQRLISLVDVLIFASSLGFTEIEAEKSMSSGGILRQCLRLVCAVAVRNCLECQQHSQLKTRGDKALKPMHSLIPLGKSAAKSPVDIVTGGISPVRDLDRLLQDMDINRLRAVVFRDIEDSKQAQFLALAVVYFISVLMVSKYRDILEPQNERHSQSCTETGSENENVSLSEITPAAFSTLTTASVEESESTSSARRRDSGIGEETATGLGSHVEVTPHTAPPGVSAGPDAISEVLSTLSLEVNKSPETKNDRGNDLDTKATPSVSVSKNVNVKDILRSLVNIPADGVTVDPALLPPACLGALGDLSVEQPVQFRSFDRSVIVAAKKSAVSPSTFNTSIPTNAVSVVSSVDSAQASDMGGESPGSRSSNAKLPSVPTVDSVSQDPVSNMSITERLEHALEKAAPLLREIFVDFAPFLSRTLLGSHGQELLIEGTSLVCMKSSSSVVELVMLLCSQEWQNSIQKNAGLAFIELVNEGRLLSQTMKDHLVRVANEAEFILSRQRAEDIHRHAEFESLCAQYSADKREDEKMCDHLIRAAKYRDHVTATQLIQKIINILTDKHGAWGNSAVSRPLEFWRLDYWEDDLRRRRRFVRNPLGSTHPEATLKTAVEHATDEDILAKGKQSIRSQALGNQNSENEILLEGDDDTLSSVDEKDLENLAGPVSLSTPAQLVAPSVVVKGTLSVTSSELYFEVDEEDPNFKKIDPKILAYTEGLHGKWLFTEIRSIFSRRYLLQNTALEIFMANRVAVMFNFPDPATVKKVVNYLPRVGVGTSFGLPQTRRISLASPRQLFKASNMTQRWQHREISNFEYLMFLNTIAGRSYNDLNQYPVFPWVITNYESEELDLTLPTNFRDLSKPIGALNPKRAAFFAERYESWEDDQVPKFHYGTHYSTASFVLAWLLRIEPFTTYFLNLQGGKFDHADRTFSSISRAWRNSQRDTSDIKELIPEFYYLPEMFVNFNNYNLGVMDDGTVVSDVELPPWAKTSEEFVHINRLALESEFVSCQLHQWIDLIFGYKQQGPEAVRALNVFYYLTYEGAVNLNSITDPVLREAVEAQIRSFGQTPSQLLIEPHPPRGSAMQVSPLMFTDKAQQDVIMVLKFPSNSPVTHVAANTQPGLATPAVITVTANRLFAVNKWHNLPAHQGAVQDQPYQLPVEIDPLIASNTGMHRRQITDLLDQSIQVHSQCFVITSDNRYILVCGFWDKSFRVYSTDTGRLIQVVFGHWDVVTCLARSESYIGGNCYILSGSRDATLLLWYWNGKCSGIGDNPGSETAAPRAILTGHDYEVTCAAVCAELGLVLSGSQEGPCLIHSMNGDLLRTLEGPENCLKPKLIQASREGHCVIFYENGLFCTFSVNGKLQATMETDDNIRAIQLSRDGQYLLTGGDRGVVVVRQVSDLKQLFAYPGCDAGIRAMALSYDQRCIISGMASGSIVLFYNDFNRWHHEYQTRY

SEQ ID NO: 196 - protein, 707 aa, Homo sapiens
MNQELLSVGSKRRRTGGSLRGNPSSSQVDEEQMNRVVEEEQQQQLRQQEEEHTARNGEVVGVEPRPGGQNDSQQGQLEENNNRFISVDEDSSGNQEEQEEDEEHAGEQDEEDEEEEEMDQESDDFDQSDDSSREDEHTHTNSVTNSSSIVDLPVHQLSSPFYTKTTKMKRKLDHGSEVRSFSLGKKPCKVSEYTSTTGLVPCSATPTTFGDLRAANGQGQQRRRITSVQPPTGLQEWLKMFQSWSGPEKLLALDELIDSCEPTQVKHMMQVIEPQFQRDFISLLPKELALYVLSFLEPKDLLQAAQTCRYWRILAEDNLLWREKCKEEGIDEPLHIKRRKVIKPGFIHSPWKSAYIRQHRIDTNWRRGELKSPKVLKGHDDHVITCLQFCGNRIVSGSDDNTLKVWSAVTGKCLRTLVGHTGGVWSSQMRDNIIISGSTDRTLKVWNAETGECIHTLYGHTSTVRCMHLHEKRVVSGSRDATLRVWDIETGQCLHVLMGHVAAVRCVQYDGRRVVSGAYDFMVKVWDPETETCLHTLQGHTNRVYSLQFDGIHVVSGSLDTSIRVWDVETGNCIHTLTGHQSLTSGMELKDNILVSGNADSTVKIWDIKTGQCLQTLQGPNKHQSAVTCLQFNKNFVITSSDDGTVKLWDLKTGEFIRNLVTLESGGSGGVVWRIRASNTKLVCAVGSRNGTEETKLLVLDFDVDMK

SEQ ID NO: 197 - protein, 589 aa, Homo sapiens
MSKPGKPTLNHGLVPVDLKSAKEPLPHQTVMKIFSISIIAQGLPFCRRRMKRKLDHGSEVRSFSLGKKPCKVSEYTSTTGLVPCSATPTTFGDLRAANGQGQQRRRITSVQPPTGLQEWLKMFQSWSGPEKLLALDELIDSCEPTQVKHMMQVIEPQFQRDFISLLPKELALYVLSFLEPKDLLQAAQTCRYWRILAEDNLLWREKCKEEGIDEPLHIKRRKVIKPGFIHSPWKSAYIRQHRIDTNWRRGELKSPKVLKGHDDHVITCLQFCGNRIVSGSDDNTLKVWSAVTGKCLRTLVGHTGGVWSSQMRDNIIISGSTDRTLKVWNAETGECIHTLYGHTSTVRCMHLHEKRVVSGSRDATLRVWDIETGQCLHVLMGHVAAVRCVQYDGRRVVSGAYDFMVKVWDPETETCLHTLQGHTNRVYSLQFDGIHVVSGSLDTSIRVWDVETGNCIHTLTGHQSLTSGMELKDNILVSGNADSTVKIWDIKTGQCLQTLQGPNKHQSAVTCLQFNKNFVITSSDDGTVKLWDLKTGEFIRNLVTLESGGSGGVVWRIRASNTKLVCAVGSRNGTEETKLLVLDFDVDMK

SEQ ID NO: 198 - protein, 627 aa, Homo sapiens
MCVPRSGLILSCICLYCGVLLPVLLPNLPFLTCLSMSTLESVTYLPEKGLYCQRLPSSRTHGGTESLKGKNTENMGFYGTLKMIFYKMKRKLDHGSEVRSFSLGKKPCKVSEYTSTTGLVPCSATPTTFGDLRAANGQGQQRRRITSVQPPTGLQEWLKMFQSWSGPEKLLALDELIDSCEPTQVKHMMQVIEPQFQRDFISLLPKELALYVLSFLEPKDLLQAAQTCRYWRILAEDNLLWREKCKEEGIDEPLHIKRRKVIKPGFIHSPWKSAYIRQHRIDTNWRRGELKSPKVLKGHDDHVITCLQFCGNRIVSGSDDNTLKVWSAVTGKCLRTLVGHTGGVWSSQMRDNIIISGSTDRTLKVWNAETGECIHTLYGHTSTVRCMHLHEKRVVSGSRDATLRVWDIETGQCLHVLMGHVAAVRCVQYDGRRVVSGAYDFMVKVWDPETETCLHTLQGHTNRVYSLQFDGIHVVSGSLDTSIRVWDVETGNCIHTLTGHQSLTSGMELKDNILVSGNADSTVKIWDIKTGQCLQTLQGPNKHQSAVTCLQFNKNFVITSSDDGTVKLWDLKTGEFIRNLVTLESGGSGGVVWRIRASNTKLVCAVGSRNGTEETKLLVLDFDVDMK

SEQ ID NO: 199 - protein, 70 aa, Homo sapiens
MNQELLSVGSKRRRTGGSLRGNPSSSQVDEEQMNRVVEEEQQQQLRQQEEEHTARNGEVVGVEPRPGGQN

SEQ ID NO: 200 - protein, 158 aa, Homo sapiens
MNQELLSVGSKRRRTGGSLRGNPSSSQVDEEQMNRVVEEEQQQQLRQQEEEHTARNGEVVGVEPRPGGQNDSQQGQLEENNNRFISVDEDSSGNQEEQEEDEEHAGEQDEEDEEEEEMDQESDDFDQSDDSSREDEHTHTNSVTNSSSIVDLPVHQLS

SEQ ID NO: 201 - protein, 176 aa, Homo sapiens
MNQELLSVGSKRRRTGGSLRGNPSSSQVDEEQMNRVVEEEQQQQLRQQEEEHTARNGEVVGVEPRPGGQNDSQQGQLEENNNRFISVDEDSSGNQEEQEEDEEHAGEQDEEDEEEEEMDQESDDFDQSDDSSREDEHTHTNSVTNSSSIVDLPVHQLSSPFYTKTTKVSIFNILLT

SEQ ID NO: 202 - protein, 890 aa, Homo sapiens
MSANNSPPSAQKSVLPTAIPAVLPAASPCSSPKTGLSARLSNGSFSAPSLTNSRGSVHTVSFLLQIGLTRESVTIEAQELSLSAVKDLVCSIVYQKFPECGFFGMYDKILLFRHDMNSENILQLITSADEIHEGDLVEVVLSALATVEDFQIRPHTLYVHSYKAPTFCDYCGEMLWGLVRQGLKCEGCGLNYHKRCAFKIPNNCSGVRKRRLSNVSLPGPGLSVPRPLQPEYVALPSEESHVHQEPSKRIPSWSGRPIWMEKMVMCRVKVPHTFAVHSYTRPTICQYCKRLLKGLFRQGMQCKDCKFNCHKRCASKVPRDCLGEVTFNGEPSSLGTDTDIPMDIDNNDINSDSSRGLDDTEEPSPPEDKMFFLDPSDLDVERDEEAVKTISPSTSNNIPLMRVVQSIKHTKRKSSTMVKEGWMVHYTSRDNLRKRHYWRLDSKCLTLFQNESGSKYYKEIPLSEILRISSPRDFTNISQGSNPHCFEIITDTMVYFVGENNGDSSHNPVLAATGVGLDVAQSWEKAIRQALMPVTPQASVCTSPGQGKDHKDLSTSISVSNCQIQENVDISTVYQIFADEVLGSGQFGIVYGGKHRKTGRDVAIKVIDKMRFPTKQESQLRNEVAILQNLHHPGIVNLECMFETPERVFVVMEKLHGDMLEMILSSEKSRLPERITKFMVTQILVALRNLHFKNIVHCDLKPENVLLASAEPFPQVKLCDFGFARIIGEKSFRRSVVGTPAYLAPEVLRSKGYNRSLDMWSVGVIIYVSLSGTFPFNEDEDINDQIQNAAFMYPPNPWREISGEAIDLINNLLQVKMRKRYSVDKSLSHPWLQDYQTWLDLREFETRIGERYITHESDDARWEIHAYTHNLVYPKHFIMAPNPDDMEEDP

SEQ ID NO: 203 - protein, 185 aa, Homo sapiens
  misc_feature (1)..(1): Xaa can be any naturally occurring amino acid
XTSISVSNCQIQENVDISTVYQIFADEVLGSGQFGIVYGGKHRKTGRDVAIKVIDKMRFPTKQESQLRNEVAILQILVALRNLHFKNIVHCDLKPENVLLASAEPFPQVKLCDFGFARIIGEKSFRRSVVGTPAYLAPEVLRSKGYNRSLDMWSVGVIIYVSLSGTFPFNEDEDINDQIQNAAFM

SEQ ID NO: 204 - protein, 173 aa, Homo sapiens [sequence omitted]

SEQ ID NO: 205 - protein, 181 aa, Homo sapiens
MYDKILLFRHDMNSENILQLITSADEIHEGDLVEVVLSALATVEDFQIRPHTLYVHSYKAPTFCDYCGEMLWGLVRQGLKCEGCGLNYHKRCAFKIPNNCSGVRKRRLSNVSLPGPGLSVPRPLQPEYVALPSEESHVHQEPSKRIPSWSGRPIWMEKMVMCRVKVPHTFAVHSYTRPTIC

SEQ ID NO: 206 - protein, 642 aa, Homo sapiens
MAASRKPPRVRVNHQDFQLRNLRIIEPNEVTHSGDTGVETDGRMPPKVTSELLRQLRQAMRNSEYVTEPIQAYIIPSGDAHQSEYIAPCDCRRAFVSGFDGSAGTAIITEEHAAMWTDGRYFLQAAKQMDSNWTLMKMGLKDTPTQEDWLVSVLPEGSRVGVDPLIIPTDYWKKMAKVLRSAGHHLIPVKENLVDKIWTDRPERPCKPLLTLGLDYTGISWKDKVADLRLKMAERNVMWFVVTALDEIAWLFNLRGSDVEHNPVFFSYAIIGLETIMLFIDGDRIDAPSVKEHLLLDLGLEAEYRIQVHPYKSILSELKALCADLSPREKVWVSDKASYAVSETIPKDHRCCMPYTPICIAKAVKNSAESEGMRRAHIKDAVALCELFNWLEKEVPKGGVTEISAADKAEEFRRQQADFVDLSFPTISSTGPNGAIIHYADGTTDVTRTMHFGTPTAYEKECFTYVLKGHIAVSAAVFPTGTKGHLLDSFARSALWDSGLDYLHGTGHGVGSFLNVHEGPCGISYKTFSDEPLEAGMIVTDEPGYYEDGAFGIRIENVVLVVPVKTKYNFNNRGSLTFEPLTLVPIQTKMIDVDSLTDKECDWLNNYHLTCRDVIGKELQKQGRQEALEWLIRETQPISKQH

SEQ ID NO: 207 - protein, 303 aa, Homo sapiens
MPPKVTSELLRQLRQAMRNSEYVTEPIQAYIIPSGDAHQSEYIAPCDCRRAFVSGFDGSAGTAIITEEHAAMWTDGRYFLQAAKQMDSNWTLMKMGLKDTPTQEDWLVSVLPEGSRVGVDPLIIPTDYWKKMAKVLRSAGHHLIPVKENLVDKIWTDRPERPCKPLLTLGLDYTGISWKDKVADLRLKMAERNVMWFVVTALDEIAWLFNLRGSDVEHNPVFFSYAIIGLETIMLFIDGDRIDAPSVKEHLLLDLGLEAEYRIQVHPYKSILSELKALCADLSPREKVWVSDKASYAVSETIP

SEQ ID NO: 208 - protein, 552 aa, Homo sapiens
MWTDGRYFLQAAKQMDSNWTLMKMGLKDTPTQEDWLVSVLPEGSRVGVDPLIIPTDYWKKMAKVLRSAGHHLIPVKENLVDKIWTDRPERPCKPLLTLGLDYTGISWKDKVADLRLKMAERNVMWFVVTALDEIAWLFNLRGSDVEHNPVFFSYAIIGLETIMLFIDGDRIDAPSVKEHLLLDLGLEAEYRIQVHPYKSILSELKALCADLSPREKVWVSDKASYAVSETIPKDHRCCMPYTPICIAKAVKNSAESEGMRRAHIKDAVALCELFNWLEKEVPKGGVTEISAADKAEEFRRQQADFVDLSFPTISSTGPNGAIIHYAPVPETNRTLSLDEVYLIDSGAQYKDGTTDVTRTMHFGTPTAYEKECFTYVLKGHIAVSAAVFPTGTKGHLLDSFARSALWDSGLDYLHGTGHGVGSFLNVHEGPCGISYKTFSDEPLEAGMIVTDEPGYYEDGAFGIRIENVVLVVPVKTKYNFNNRGSLTFEPLTLVPIQTKMIDVDSLTDKECDWLNNYHLTCRDVIGKELQKQGRQEALEWLIRETQPISKQH

SEQ ID NO: 209 - protein, 666 aa, Homo sapiens
MAASRKPPRVRVNHQDFQLRNLRIIEPNEVTHSGDTGVETDGRMPPKVTSELLRQLRQAMRNSEYVTEPIQAYIIPSGDAHQSEYIAPCDCRRAFVSGFDGSAGTAIITEEHAAMWTDGRYFLQAAKQMDSNWTLMKMGLKDTPTQEDWLVSVLPEGSRVGVDPLIIPTDYWKKMAKVLRSAGHHLIPVKENLVDKIWTDRPERPCKPLLTLGLDYTGISWKDKVADLRLKMAERNVMWFVVTALDEIAWLFNLRGSDVEHNPVFFSYAIIGLETIMLFIDGDRIDAPSVKEHLLLDLGLEAEYRIQVHPYKSILSELKALCADLSPREKVWVSDKASYAVSETIPKDHRCCMPYTPICIAKAVKNSAESEGMRRAHIKDAVALCELFNWLEKEVPKGGVTEISAADKAEEFRRQQADFVDLSFPTISSTGPNGAIIHYAPVPETNRTLSLDEVYLIDSGAQYKDGTTDVTRTMHFGTPTAYEKECFTYVLKGHIAVSAAVFPTGTKGHLLDSFARSALWDSGLDYLHGTGHGVGSFLNVHEGPCGISYKTFSDEPLEAGMIVTDEPGYYEDGAFGIRIENVVLVVPVKTKYNFNNRGSLTFEPLTLVPIQTKMIDVDSLTDKECDWLNNYHLTCRDVIGKELQKQGRQEALEWLIRETQPISKQH

SEQ ID NO: 210 - protein, 233 aa, Homo sapiens
MPPKVTSELLRQLRQAMRNSEYVTEPIQAYIIPSGDAHQSEYIAPCDCRRAFVSGFDGSAGTAIITEEHAAMWTDGRYFLQAAKQMDSNWTLMKMGLKDTPTQEDWLVSVLPEGSRVGVDPLIIPTDYWKKMAKVLRSAGHHLIPVKENLVDKIWTDRPERPCKPLLTLGLDYTGLFNLRGSDVEHNPVFFSYAIIGLETIMLFIDGDRIDAPSVKEHLLLDLGLEAEYRIQV

SEQ ID NO: 211 - protein, 737 aa, Homo sapiens
MVVFNGLLKIKICEAVSLKPTAWSLRHAVGPRPQTFLLDPYIALNVDDSRIGQTATKQKTNSPAWHDEFVTDVCNGRKIELAVFHDAPIGYDDFVANCTIQFEELLQNGSRHFEDWIDLEPEGRVYVIIDLSGSSGEAPKDNEERVFRERMRPRKRQGAVRRRVHQVNGHKFMATYLRQPTYCSHCRDFIWGVIGKQGYQCQVCTCVVHKRCHELIITKCAGLKKQETPDQVGSQRFSVNMPHKFGIHNYKVPTFCDHCGSLLWGLLRQGLQCKVCKMNVHRRCETNVAPNCGVDARGIAKVLADLGVTPDKITNSGQRRKKLIAGAESPQPASGSSPSEEDRSKSAPTSPCDQEIKELENNIRKALSFDNRGEEHRAASSPDGQLMSPGENGEVRQGQAKRLGLDEFNFIKVLGKGSFGKVMLAELKGKDEVYAVKVLKKDVILQDDDVDCTMTEKRILALARKHPYLTQLYCCFQTKDRLFFVMEYVNGGDLMFQIQRSRKFDEPRSRFYAAEVTSALMFLHQHGVIYRDLKLDNILLDAEGHCKLADFGMCKEGILNGVTTTTFCGTPDYIAPEILQELEYGPSVDWWALGVLMYEMMAGQPPFEADNEDDLFESILHDDVLYPVWLSKEAVSILKAFMTKNPHKRLGCVASQNGEDAIKQHPFFKEIDWVLLEQKKIKPPFKPRIKTKRDVNNFDQDFTREEPVLTLVDEAIVKQINQEEFKGFSYFGEDLMP

SEQ ID NO: 212 - protein, 219 aa, Homo sapiens
MNVHRRCETNVAPNCGVDARGIAKVLADLGVTPDKITNSGQRRKKLIAGAESPQPASGSSPSEEDRSKSAPTSPCDQEIKELENNIRKALSFDNRGEEHRAASSPDGQLMSPGENGEVRQGQAKRLGLDEFNFIKVLGKGSFGKVMLAELKGKDEVYAVKVLKKDVILQDDDVDCTMTEKRILALARKHPYLTQLYCCFQTKGTGFSIQGCACEGMREL

SEQ ID NO: 213 - protein, 127 aa, Homo sapiens
MVVFNGLLKIKICEAVSLKPTAWSLRHAVGPRPQTFLLDPYIALNVDDSRIGQTATKQKTNSPAWHDEFVTDVCNGRKIELAVFHDAPIGYDDFVANCTIQFEELLQNGSRHFEDWIDLEPEGRVYV

SEQ ID NO: 214 - protein, 851 aa, Homo sapiens
MAQWEMLQNLDSPFQDQLHQLYSHSLLPVDIRQYLAVWIEDQNWQEAALGSDDSKATMLFFHFLDQLNYECGRCSQDPESLLLQHNLRKFCRDIQPFSQDPTQLAEMIFNLLLEEKRILIQAQRAQLEQGEPVLETPVESQQHEIESRILDLRAMMEKLVKSISQLKDQQDVFCFRYKIQAKGKTPSLDPHQTKEQKILQETLNELDKRRKEVLDASKALLGRLTTLIELLLPKLEEWKAQQQKACIRAPIDHGLEQLETWFTAGAKLLFHLRQLLKELKGLSCLVSYQDDPLTKGVDLRNAQVTELLQRLLHRAFVVETQPCMPQTPHRPLILKTGSKFTVRTRLLVRLQEGNESLTVEVSIDRNPPQLQGFRKFNILTSNQKTLTPEKGQSQGLIWDFGYLTLVEQRSGGSGKGSNKGPLGVTEELHIISFTVKYTYQGLKQELKTDTLPVVIISNMNQLSIAWASVLWFNLLSPNLQNQQFFSNPPKAPWSLLGPALSWQFSSYVGRGLNSDQLSMLRNKLFGQNCRTEDPLLSWADFTKRESPPGKLPFWTWLDKILELVHDHLKDLWNDGRIMGFVSRSQERRLLKKTMSGTFLLRFSESSEGGITCSWVEHQDDDKVLIYSVQPYTKEVLQSLPLTEIIRHYQLLTEENIPENPLRFLYPRIPRDEAFGCYYQEKVNLQERRKYLKHRLIVVSNRQVDELQQPLELKPEPELESLELELGLVPEPELSLDLEPLLKAGLDLGPELESVLESTLEPVIEPTLCMVSQTVPEPDQGPVSQPVPEPDLPCDLRHLNTEPMEIFRNCVKIEEIMPNGDPLLAGQNTVDEVYVSRPSHFYTDGPLMPSDF

SEQ ID NO: 215 - protein, 460 aa, Homo sapiens
MAQWEMLQNLDSPFQDQLHQLYSHSLLPVDIRQYLAVWIEDQNWQEAALGSDDSKATMLFFHFLDQLNYECGRCSQDPESLLLQHNLRKFCRDIQDPTQLAEMIFNLLLEEKRILIQAQRAQLEQGEPVLETPVESQQHEIESRILDLRAMMEKLVKSISQLKDQQDVFCFRYKIQAKGKTPSLDPHQTKEQKILQETLNELDKRRKEVLDASKALLGRLTTLIELLLPKLEEWKAQQQKACIRAPIDHGLEQLETWFTAGAKLLFHLRQLLKELKGLSCLVSYQDDPLTKGVDLRNAQVTELLQRLLHRAFVVETQPCMPQTPHRPLILKTGSKFTVRTRLLVRLQEGNESLTVEVSIDRNPPQLQGFRKFNILTSNQKTLTPEKGQSQGLIWDFGYLTLVEQRSGGSGKGSNKGPLGVTEELHIISFTVKYTYQGLKQELKVSENGGQGERKQLWKKA

SEQ ID NO: 216 - protein, 203 aa, Homo sapiens
MAQWEMLQNLDSPFQDQLHQLYSHSLLPVDIRQYLAVWIEDQNWQEAALGSDDSKATMLFFHFLDQLNYECGRCSQDPESLLLQHNLRKFCRDIQPFSQDPTQLAEMIFNLLLEEKRILIQAQRAQLEQGEPVLETPVESQQHEIESRILDLRAMMEKLVKSISQLKDQQDVFCFRYKIQAKGRKHIEGLEKDKCLLRSRSWK

SEQ ID NO: 217 - protein, 199 aa, Homo sapiens
MAQWEMLQNLDSPFQDQLHQLYSHSLLPVDIRQYLAVWIEDQNWQEAALGSDDSKATMLFFHFLDQLNYECGRCSQDPESLLLQHNLRKFCRDIQDPTQLAEMIFNLLLEEKRILIQAQRAQLEQGEPVLETPVESQQHEIESRILDLRAMMEKLVKSISQLKDQQDVFCFRYKIQAKGRKHIEGLEKDKCLLRSRSWK

SEQ ID NO: 218 - protein, 65 aa, Homo sapiens
MAQWEMLQNLDSPFQDQLHQLYSHSLLPVDIRQYLAVWIEDQNWKLHLGVMIPRLPCYSSTSWIS

SEQ ID NO: 219 - protein, 818 aa, Homo sapiens
MAQWEMLQNLDSPFQDQLHQLYSHSLLPVDIRQYLAVWIEDQNWQEAALGSDDSKATMLFFHFLDQLNYECGRCSQDPESLLLQHNLRKFCRDIQPFSQDPTQLAEMIFNLLLEEKRILIQAQRAQLEQGEPVLETPVESQQHEIESRILDLRAMMEKLVKSISQLKDQQDVFCFRYKIQAKGKTPSLDPHQTKEQKILQETLNELDKRRKEVLDASKALLGRLTTLIELLLPKLEEWKAQQQKACIRAPIDHGLEQLETWFTAGAKLLFHLRQLLKELKGLSCLVSYQDDPLTKGVDLRNAQVTELLQRLLHRAFVVETQPCMPQTPHRPLILKTGSKFTVRTRLLVRLQEGNESLTVEVSIDRNPPQLQGFRKFNILTSNQKTLTPEKGQSQGLIWDFGYLTLVEQRSGGSGKGSNKGPLGVTEELHIISFTVKYTYQGLKQELKNQQFFSNPPKAPWSLLGPALSWQFSSYVGRGLNSDQLSMLRNKLFGQNCRTEDPLLSWADFTKRESPPGKLPFWTWLDKILELVHDHLKDLWNDGRIMGFVSRSQERRLLKKTMSGTFLLRFSESSEGGITCSWVEHQDDDKVLIYSVQPYTKEVLQSLPLTEIIRHYQLLTEENIPENPLRFLYPRIPRDEAFGCYYQEKVNLQERRKYLKHRLIVVSNRQVDELQQPLELKPEPELESLELELGLVPEPELSLDLEPLLKAGLDLGPELESVLESTLEPVIEPTLCMVSQTVPEPDQGPVSQPVPEPDLPCDLRHLNTEPMEIFRNCVKIEEIMPNGDPLLAGQNTVDEVYVSRPSHFYTDGPLMPSDF

SEQ ID NO: 220 - protein, 847 aa, Homo sapiens
MAQWEMLQNLDSPFQDQLHQLYSHSLLPVDIRQYLAVWIEDQNWQEAALGSDDSKATMLFFHFLDQLNYECGRCSQDPESLLLQHNLRKFCRDIQDPTQLAEMIFNLLLEEKRILIQAQRAQLEQGEPVLETPVESQQHEIESRILDLRAMMEKLVKSISQLKDQQDVFCFRYKIQAKGKTPSLDPHQTKEQKILQETLNELDKRRKEVLDASKALLGRLTTLIELLLPKLEEWKAQQQKACIRAPIDHGLEQLETWFTAGAKLLFHLRQLLKELKGLSCLVSYQDDPLTKGVDLRNAQVTELLQRLLHRAFVVETQPCMPQTPHRPLILKTGSKFTVRTRLLVRLQEGNESLTVEVSIDRNPPQLQGFRKFNILTSNQKTLTPEKGQSQGLIWDFGYLTLVEQRSGGSGKGSNKGPLGVTEELHIISFTVKYTYQGLKQELKTDTLPVVIISNMNQLSIAWASVLWFNLLSPNLQNQQFFSNPPKAPWSLLGPALSWQFSSYVGRGLNSDQLSMLRNKLFGQNCRTEDPLLSWADFTKRESPPGKLPFWTWLDKILELVHDHLKDLWNDGRIMGFVSRSQERRLLKKTMSGTFLLRFSESSEGGITCSWVEHQDDDKVLIYSVQPYTKEVLQSLPLTEIIRHYQLLTEENIPENPLRFLYPRIPRDEAFGCYYQEKVNLQERRKYLKHRLIVVSNRQVDELQQPLELKPEPELESLELELGLVPEPELSLDLEPLLKAGLDLGPELESVLESTLEPVIEPTLCMVSQTVPEPDQGPVSQPVPEPDLPCDLRHLNTEPMEIFRNCVKIEEIMPNGDPLLAGQNTVDEVYVSRPSHFYTDGPLMPSDF

SEQ ID NO: 221 - protein, 261 aa, Homo sapiens
MAQWEMLQNLDSPFQDQLHQLYSHSLLPVDIRQYLAVWIEDQNWQEAALGSDDSKATMLFFHFLDQLNYECGRCSQDPESLLLQHNLRKFCRDIQPFSQDPTQLAEMIFNLLLEEKRILIQAQRAQLEQGEPVLETPVESQQHEIESRILDLRAMMEKLVKSISQLKDQQDVFCFRYKIQAKGKTPSLDPHQTKEQKILQETLNELDKRRKEVLDASKALLGRLTTLIELLLPKLEEWKAQQQKACIRAPIDHGLEQLETW

SEQ ID NO: 222 - protein, 271 aa, Homo sapiens
MLQACKMEGFPLVPPQPSEDLVPYDTDLYQRQTHEYYPYLSSDGESHSDHYWDFHPHHVHSEFESFAENNFTELQSVQPPQLQQLYRHMELEQMHVLDTPMVPPHPSLGHQVSYLPRMCLQYPSLSPAQPSSDEEEGERQSPPLEVSDGEADGLEPGPGLLPGETGSKKKIRLYQFLLDLLRSGDMKDSIWWVDKDKGTFQFSSKHKEALAHRWGIQKGNRKKMTYQKMARALRNYGKTGEVKKVKKKLTYQFSGEVLGRGGLAERRHPPH

SEQ ID NO: 223 - protein, 270 aa, Homo sapiens
MLQACKMEGFPLVPPPSEDLVPYDTDLYQRQTHEYYPYLSSDGESHSDHYWDFHPHHVHSEFESFAENNFTELQSVQPPQLQQLYRHMELEQMHVLDTPMVPPHPSLGHQVSYLPRMCLQYPSLSPAQPSSDEEEGERQSPPLEVSDGEADGLEPGPGLLPGETGSKKKIRLYQFLLDLLRSGDMKDSIWWVDKDKGTFQFSSKHKEALAHRWGIQKGNRKKMTYQKMARALRNYGKTGEVKKVKKKLTYQFSGEVLGRGGLAERRHPPH

SEQ ID NO: 224 - protein, 35 aa, Homo sapiens
MLQACKMEGFPLVPPAARRRSACTSSCWTCSAAAT

SEQ ID NO: 225 - protein, 245 aa, Homo sapiens
MLQACKMEGFPLVPPPSEDLVPYDTDLYQRQTHEYYPYLSSDGESHSDHYWDFHPHHVHSEFESFAENNFTELQSVQPPQLQQLYRHMELEQMHVLDTPMVPPHPSLGHQVSYLPRMCLQYPSLSPAQPSSDEEEGERQSPPLEVSDGEADGLEPGPGLLPGETGGAPGPPPWPRPWPCLCPAPTQPGQLTQQPRHRVACVCVCMFASVCVLWGCLWLSLCVCICCVVHTGISMKCARCVCLSVP

SEQ ID NO: 226 - protein, 494 aa, Homo sapiens
MAWPNVFQRGSLLSQFSHHHVVVFLLTFFSYSLLHASRKTFSNVKVSISEQWTPSAFNTSVELPVEIWSSNHLFPSAEKATLFLGTLDTIFLFSYAVGLFISGIVGDRLNLRWVLSFGMCSSALVVFVFGALTEWLRFYNKWLYCCLWIVNGLLQSTGWPCVVAVMGNWFGKAGRGVVFGLWSACASVGNILGACLASSVLQYGYEYAFLVTASVQFAGGIVIFFGLLVSPEEIGLSGIEAEENFEEDSHRPLINGGENEDEYEPNYSIQDDSSVAQVKAISFYQACCLPGVIPYSLAYACLKLVNYSFFFWLPFYLSNNFGWKEAEADKLSIWYDVGGIIGGTLQGFISDVLQKRAPVLALSLLLAVGSLIGYSRSPNDKSINALLMTVTGFFIGGPSNMISSAISADLGRQELIQRSSEALATVTGIVDGSGSIGAAVGQYLVSLIRDKLGWMWVFYFFILMTSCTIVFISPLIVREIFSLVLRRQAHILRE

SEQ ID NO: 227 - protein, 443 aa, Homo sapiens
MAWPNVFQRGSLLSQFSHHHVVVFLLTFFSYSLLHASRKTFSNVKVSISEQWTPSAFNTSVELPVEIWSSNHLFPSAEKATLFLGTLDTIFLFSYAVGLFISGIVGDRLNLRWVLSFGMCSSALVVFVFGALTEWLRFYNKWLYCCLWIVNGLLQSTGWPCVVAVMGNWFGKAGRGVVFGLWSACASVGNILGACLASSVLQYGYEYAFLVTASVQFAGGIVIFFGLLVSPEEIGLSGIEAEENFEEDSHRPLINGGENEDEYEPNYSIQDDSSVAQVKAISFYQACCLPGVIPYSLAYACLKLVNYSFFFWLPFYLSNNFGWKEAEADKLSIWYDVGGIIVFSVSDPGQARMDVGFLLFHSHDKLYNCVYLAINSEGNILSRAKETGSHIEGVTGARETERTMSATSGPLGLRVCPNLGLSRSSSLILDCQASLNTASHLRC

SEQ ID NO: 228 - protein, 125 aa, Homo sapiens
GLFISGIVGDRLNLRWVLSFGMCSSALVVFVFGALTEWLRFYNKWLYCCLWIVNGLLQSTGWPCVVAVMGNWFGKAGRGVVFGLWSACASVGNILGACLASSVLQYGYEICKDHLSPLSSSMPFW

SEQ ID NO: 229 - protein, 66 aa, Homo sapiens
MAWPNVFQRGSLLSQFSHHHVVVFLLTFFSYSLLHASRKTFSNVKVSISEQWTPSAFNTSVELPVE

SEQ ID NO: 230 - protein, 56 aa, Homo sapiens
QRSSEALATVTGIVDGSGSIGAAVGQTSCTIVFISPLIVREIFSLVLRRQAHILRE

SEQ ID NO: 231 - protein, 151 aa, Homo sapiens
  misc_feature (1)..(1): Xaa can be any naturally occurring amino acid
XLLLAVGSLIGYSRSPNDKSINALLMTVTGFFIGGPSNMISSAISADLGRQELIQRSSEALATVTGIVDGSGSIGAAVGQYLVSLIRDKLGWMWVFYFFILMTGSHIEGVTGARETERTMSATSGPLGLRVCPNLGLSRSSSLILDCQASL

SEQ ID NO: 232 - protein, 178 aa, Homo sapiens
  misc_feature (1)..(1): Xaa can be any naturally occurring amino acid
XAEKATLFLGTLDTIFLFSYAVGLFISGIVGDRLNLRWVLSFGMCSSALVVFVFGALTEWLRFYNKWLYCCLWIVNGLLQSTGWPCVVAVMGNWFGKAGRGVVFGLWSACASVGNILGACLASSVLQYGYEYSLAYACLKLVNYSFFFWLPFYLSNNFGWKEAEADKLSIWYDVGGII

SEQ ID NO: 233 - protein, 98 aa, Homo sapiens
  misc_feature (1)..(1): Xaa can be any naturally occurring amino acid
XSAISADLGRQELIQRSSEALATVTGIVDGSGSIGAAVGQETGSHIEGVTGARETERTMSATSGPLGLRVCPNLGLSRSSSLILDCQASLNTASHLRC

SEQ ID NO: 234 - protein, 161 aa, Homo sapiens
LSLLLAVGSLIGYSRSPNDKSINALLMTVTGFFIGGPSNMISSAISADLGRQELIQRSSEALATVTGIVDGSGSIGAAVGQYLVSLIRDKLGWMWVFYFFILMETGSHIEGVTGARETERTMSATSGPLGLRVCPNLGLSRSSSLILDCQASLNTASHLRC

SEQ ID NO: 235 - protein, 224 aa, Homo sapiens
MAWPNVFQRGSLLSQFSHHHVVVFLLTFFSYSLLHASRKTFSNVKVSISEQWTPSAFNTSVELPVEIWSSNHLFPSAEKATLFLGTLDTIFLFSYAVGLFISGIVGDRLNLRWVLSFGMCSSALVVFVFGALTEWLRFYNKWLYCCLWIVNGLLQSTGWPCVVAVMGNWFGKAGRGVVFGLWSACASVGNILGACLASSVLQYGYEVSRVLRQKKTLKKTHTGH

SEQ ID NO: 236 - protein, 193 aa, Homo sapiens
  misc_feature (1)..(1): Xaa can be any naturally occurring amino acid
XIFFGLLVSPEEIGLSGIEAEENFEEDSHRPLINGGENEDEYEPNYSIQDDSSVAQVKAISFYQACCLPGVIPYSLAYACLKLVNYSFFFWLPFYLSNNFGWKEAEADKLSIWYDVGGIIGGTLQGFISDVLQKRAPVLALSLLLAVGSLIGYSLFSVSDPGQARMDVGFLLFHSHDKLYNCVYLAINSEGNI

SEQ ID NO: 237 - protein, 54 aa, Homo sapiens
MAWPNVFQRGSLLSQFSHHHVVVFLLTFFRCLSLVRSQNGCVSTTNGCTAACGL

SEQ ID NO: 238 - protein, 122 aa, Homo sapiens
GWKEAEADKLSIWYDVGGIIVFSVSDPGQARMDVGFLLFHSHDKLYNCVYLAINSEGNILSRAKETGSHIEGVTGARETERTMSATSGPLGLRVCPNLGLSRSSSLILDCQASLNTASHLRC

SEQ ID NO: 239 - protein, 153 aa, Homo sapiens
MAWPNVFQRGSLLSQFSHHHVVVFLLTFFSYSLLHASRKTFSNVKVSISEQWTPSAFNTSVELPVEIWSSNHLFPSAEKATLFLGTLDTIFLFSYAVGLFISGIVGDRLNLRWVLSFGMCSSALVYAFLVTASVQFAGGIVIFFGLLVSPEEI

SEQ ID NO: 240 - protein, 81 aa, Homo sapiens
  misc_feature (1)..(1): Xaa can be any naturally occurring amino acid
XYSIQDDSSVAQVKAISFYQACCLPGVIPYLVSLIRDKLGWMWVFYFFILMTSCTIVFISPLIVREIFSLVLRRQAHILRE

SEQ ID NO: 241 - protein, 150 aa, Homo sapiens
  misc_feature (1)..(1): Xaa can be any naturally occurring amino acid
XFPSAEKATLFLGTLDTIFLFSYAVGLFISGIVGDRLNLRWVLSFGMCSSALVVFVFGALTEWLRFYNKWLYCCLWIVNGLLQSTGWPCVVAVMGNWFGKAGRGVVFGLWSACASVGNILGACLASSVLQYGYEICKDHLSPLSSSMPFW

SEQ ID NO: 242 - protein, 478 aa, Homo sapiens
MAWPNVFQRGSLLSQFSHHHVVVFLLTFFSYSLLHASRKTFSNVKVSISEQWTPSAFNTSVELPVEIWSSNHLFPSAEKATLFLGTLDTIFLFSYAVGLFISGIVGDRLNLRWVLSFGMCSSALVVFVFGALTEWLRFYNKWLYCCLWIVNGLLQSTGWPCVVAVMGNWFGKAGRGVVFGLWSACASVGNILGACLASSVLQYGYEYAFLVTASVQFAGGIVIFFGLLVSPEEIGLSGIEAEENFEEDSHRPLINGGENEDEYEPNYSIQDDSSVAQVKAISFYQACCLPGVIPYSLAYACLKLVNYSFFFWLPFYLSNNFGWKEAEADKLSIWYDVGGIIGGTLQGFISDVLQKRAPVLALSLLLAVGSLIGYSRFFIGGPSNMISSAISADLGRQELIQRSSEALATVTGIVDGSGSIGAAVGQYLVSLIRDKLGWMWVFYFFILMTSCTIVFISPLIVREIFSLVLRRQAHILRE

SEQ ID NO: 243 - protein, 14 aa, Homo sapiens
MAWPNVFQRGSLLS

SEQ ID NO: 244 - protein, 426 aa, Homo sapiens
MCDRNGGRRLRQWLIEQIDSSMYPGLIWENEEKSMFRIPWKHAGKQDYNQEVDASIFKAWAVFKGKFKEGDKAEPATWKTRLRCALNKSPDFEEVTDRSQLDISEPYKVYRIVPEEEQKCKLGVATAGCVNEVTEMECGRSEIDELIKEPSVDDYMGMIKRSPSPPEACRSQLLPDWWAQQPSTGVPLVTGYTTYDAHHSAFSQMVISFYYGGKLVGQATTTCPEGCRLSLSQPGLPGTKLYGPEGLELVRFPPADAIPSERQRQVTRKLFGHLERGVLLHSSRQGVFVKRLCQGRVFCSGNAVVCKGRPNKLERDEVVQVFDTSQFFRELQQFYNSQGRLPDGRVVLCFGEEFPDMAPLRSKLILVQIEQLYVRQLAEEAGKSCGAGSVMQAPEEPPPDQVFRMFPDICASHQRSFFRENQQITV

SEQ ID NO: 245 - protein, 152 aa, Homo sapiens
  misc_feature (1)..(1): Xaa can be any naturally occurring amino acid
XAWAVFKGKFKEGDKAEPATWKTRLRCALNKSPDFEEVTDRSQLDISEPYKVYRIVPEEEQKCKLGVATAGCVNEVTEMECGRSEIDELIKESCSSSITARAGFLTAGWCCALGKSFRIWPPCAPNSFSCRLSSCMSGNWQKRLGRAVEPAL

SEQ ID NO: 246 - protein, 328 aa, Homo sapiens
MCDRNGGRRLRQWLIEQIDSSMYPGLIWENEEKSMFRIPWKHAGKQDYNQEVDASIFKAWAVFKGKFKEGDKAEPATWKTRLRCALNKSPDFEEVTDRSQLDISEPYKVYRIVPEEEQKCKLGVATAGCVNEVTEMECGRSEIDELIKEPSVDDYMGMIKRSPSPPEACRSQLLPDWWAQQPSTGVPLVTGYTTYDAHHSAFSQMVISFYYGGKLVGQATTTCPEGCRLSLSQPGLPGTKLYGPEGLELVRFPPADAIPSERQRQVTRKLFGHLERGVLLHSSRQGVFVKRLCQGRVFCSGNAVVCKGRPNKLERDEVVQVFDTSQFF

SEQ ID NO: 247 - protein, 14 aa, Homo sapiens
MGASWWARPPPPAP

SEQ ID NO: 248 - protein, 222 aa, Homo sapiens
MVISFYYGGKLVGQATTTCPEGCRLSLSQPGLPGTKLYGPEGLELVRFPPADAIPSERQRQVTRKLFGHLERGVLLHSSRQGVFVKRLCQGRVFCSGNAVVCKGRPNKLERDEVVQVFDTSQFFRELQQFYNSQGRLPDGRVVLCFGEEFPDMAPLRSKLILVQIEQLYVRQLAEEAGKSCGAGSVMQAPEEPPPDQVFRMFPDICASHQRSFFRENQQITV

SEQ ID NO: 249 - protein, 159 aa, Homo sapiens
MCDRNGGRRLRQWLIEQIDSSMYPGLIWENEEKSMFRIPWKHAGKQDYNQEVDASIFKAWAVFKGKFKEGDKAEPATWKTRLRCALNKSPDFEEVTDRSQLDISEPYKVYRIVPEEEQKCKLGVATAGCVNEVTEMECGRSEIDELIKEPSVDDYMGMI

SEQ ID NO: 250 - protein, 220 aa, Homo sapiens
MVISFYYGGKLVGQATTTCPEGCRLSLSQPGLPGTKLYGPEGLELVRFPPADAIPSERQRQVTRKLFGHLERGVLLHSSRQGVFVKRLCQGRVFCSGNAVVCKGRPNKLERDEVVQVFDTSQFFRELQQFYNSQGRLPDGRVVLCFGEEFPDMAPLRSKLILVQIEQLYVRQLAEEAGKSCGAGSVMQAPEEPPPDQVFRMFPDICASHQRSFFRENQQI

SEQ ID NO: 251 - protein, 47 aa, Homo sapiens
MCDRNGGRRLRQWLIEQIDSSMYPGLIWENEEKSMFRIPWKHAGKQD

SEQ ID NO: 252 - protein, 126 aa, Homo sapiens
MCDRNGGRRLRQWLIEQIDSSMYPGLIWENEEKSMFRIPWKHAGKQDYNQEVDASIFKAWAVFKGKFKEGDKAEPATWKTRLRCALNKSPDFEEVTDRSQLDISEPYKVYRIVPEEEQKCNYPLWA

SEQ ID NO: 253 - protein, 380 aa, Homo sapiens
MGSGCRIECIFFSEFHPTLGPKITYQVPEDFISRELFDTVQVYIITKPELQNKLITVTAMEKKLIGCPVCIEHKKYSRNALLFNLGFVCDAQAKTCALEPIVKKLAGYLTTLELESSFVSMEESKQKLVPIMTILLEELNASGRCTLPIDESNTIHLKVIEQRPDPPVAQEYDVPVFTKDKEDFFNSQWDLTTQQILPYIDGFRHIQKISAEADVELNLVRIAIQNLLYYGVVTLVSILQYSNVYCPTPKVQDLVDDKSLQEACLSYVTKQGHKRASLRDVFQLYCSLSPGTTVRDLIGRHPQQLQHVDERKLIQFGLMKNLIRRLQKYPVRVTREEQSHPARLYTGCHSYDEICCKTGMSYHELDERLENDPNIIICWK

SEQ ID NO: 254 - protein, 57 aa, Homo sapiens
MGSGCRIECIFFSEFHPTLGPKITYQVPEDFISRELFDTVQVYIITKPELQNKLITV

SEQ ID NO: 255 - protein, 87 aa, Homo sapiens
MGSGCRIECIFFSEFHPTLGPKITYQVPEDFISRELFDTVQVYIITKPELQNKLITVYGKEADRLSCVHRTQEVQPQCSPLQPGLRV

SEQ ID NO: 256 - protein, 130 aa, Homo sapiens
MGSGCRIECIFFSEFHPTLGPKITYQVPEDFISRELFDTVQVYIITKPELQNKLITVTAMEKKLIGCPVCIEHKKYSRNALLFNLGFVCDAQAKTCALEPIVKKLAGYLTTLERAASCPWRRASRSWCPS

SEQ ID NO: 257 - protein, 260 aa, Homo sapiens
MQKYEKLEKIGEGTYGTVFKAKNRETHEIVALKRVRLDDDDEGVPSSALREICLLKELKHKNIVRLHDVLHSDKKLTLVFEFCDQDLKKYFDSCNGDLDPEIVKNGELKLADFGLARAFGIPVRCYSAEVVTLWYRPPDVLFGAKLYSTSIDMWSAGCIFAELANAGRPLFPGNDVDDQLKRIFRLLGTPTEEQWPSMTKLPDYKPYPMYPATTSLVNVVPKLNATGRDLLQNLLKCNPVQRISAEEALQHPYFSDFCPP

SEQ ID NO: 258 - protein, 292 aa, Homo sapiens
MQKYEKLEKIGEGTYGTVFKAKNRETHEIVALKRVRLDDDDEGVPSSALREICLLKELKHKNIVRLHDVLHSDKKLTLVFEFCDQDLKKYFDSCNGDLDPEIVKSFLFQLLKGLGFCHSRNVLHRDLKPQNLLINRNGELKLADFGLARAFGIPVRCYSAEVVTLWYRPPDVLFGAKLYSTSIDMWSAGCIFAELANAGRPLFPGNDVDDQLKRIFRLLGTPTEEQWPSMTKLPDYKPYPMYPATTSLVNVVPKLNATGRDLLQNLLKCNPVQRISAEEALQHPYFSDFCPP

SEQ ID NO: 259 - protein, 599 aa, Homo sapiens
MSGPCGEKPVLEASPTMSLWEFEDSHSRQGTPRPGQELAAEEASALELQMKVDFFRKLGYSSTEIHSVLQKLGVQADTNTVLGELVKHGTATERERQTSPDPCPQLPLVPRGGGTPKAPNLEPPLPEEEKEGSDLRPVVIDGSNVAMSHGNKEVFSCRGILLAVNWFLERGHTDITVFVPSWRKEQPRPDVPITDQHILRELEKKKILVFTPSRRVGGKRVVCYDDRFIVKLAYESDGIVVSNDTYRDLQGERQEWKRFIEERLLMYSFVNDKFMPPDDPLGRHGPSLDNFLRKKPLTLEHRKQPCPYGRKCTYGIKCRFFHPERPSCPQRSVADELRANALLSPPRAPSKDKNGRRPSPSSQSSSLLTESEQCSLDGKKLGAQASPGSRQEGLTQTYAPSGRSLAPSGGSGSSFGPTDWLPQTLDSLPYVSQDCLDSGIGSLESQMSELWGVRGGGPGEPGPPRAPYTGYSPYGSELPATAAFSAFGRAMGAGHFSVPADYPPAPPAFPPREYWSEPYPLPPPTSVLQEPPVQSPGAGRSPWGRAGSLAKEQASVYTKLCGVFPPHLVEAVMGRFPQLLDPQQLAAEILSYKSQHPSE

SEQ ID NO: 260 - protein, 131 aa, Homo sapiens
DDRFIVKLAYESDGIVVSNDTYRDLQGERQEWKRFIEERLLMYSFVNDKLAIGPFSAIRSPCMAPTSREFFAPSAGLCPLMTHWAGTGPAWTTSCVRSHSLWSTGSSRVPMVWNPACPPRPSSLLPFLSPV

SEQ ID NO: 261 - protein, 283 aa, Homo sapiens
MSGPCGEKPVLEASPTMSLWEFEDSHSRQGTPRPGQELAAEEASALELQMKVDFFRKLGYSSTEIHSVLQKLGVQADTNTVLGELVKHGTATERERQTSPDPCPQLPLVPRGGGTPKAPNLEPPLPEEEKEGSDLRPVVIDGSNVAMSHGNKEVFSCRGILLAVNWFLERGHTDITVFVPSWRKEQPRPDVPITDQHILRELEKKKILVFTPSRRVGGKRVVCYDDRFIVKLAYESDGIVVSNDTYRDLQGERQEWKRFIEERLLMYSFVNDNKACHRPLLSN

SEQ ID NO: 262 - protein, 1560 aa, Homo sapiens [sequence omitted]

SEQ ID NO: 263 - protein, 126 aa, Homo sapiens
MDDEDGRCLLDVICDPQALNDFLHGSEKLDSDDLLDNPGEAQSAFYEGPGLHVQEASGNHLNPEPNQPAPSVDLDFLEDDILGSPATGGGGGGSGGADQPCDILQQSLQEANITEQTLEAEAELDL

SEQ ID NO: 264 - protein, 1318 aa, Homo sapiens
MALNTPTSQLLAKQVPVSGYLASAAGPSEPVTLASAGVSPQGAGLVIQKNLSAAVATTLNGNSVFGGAGAASAPTGTPSGQPLAVAPGLGSSPLVPAPNVILHRTPTPIQPKPAGVLPPKLYQLTPKPFAPAGATLTIQGEPGALPQQPKAPQNLTFMAAGKAGQNVVLSGFPAPALQANVFKQPPATTTGAAPPQPPGALSKPMSVHLLNQGSSIVIPAQHMLPGQNQFLLPGAPAVQLPQQLSALPANVGGQILAAAAPHTGGQLIANPILTNQNLAGPLSLGPVLAPHSGAHSAHILSAAPIQVGQPALFQMPVSLAAGSLPTQSQPAPAGPAATTVLQGVTLPPSAVAMLNTPDGLVQPATPAAATGEAAPVLTVQPAPQAPPAVSTPLPLGLQQPQAQQPPQAPTPQAAAPPQATTPQPSPGLASSPEKIVLGQPPSATPTAILTQDSLQMFLPQERSQQPLSAEGPHLSVPASVIVSAPPPAQDPAPATPVAKGAGLGPQAPDSQASPAPAPQIPAAAPLKGPGPSSSPSLPHQAPLGDSPHLPSPHPTRPPSRPPSRPQSVSRPPSEPPLHPCPPPQAPPTLPGIFVIQNQLGVPPPASNPAPTAPGPPQPPLRPQSQPPEGPLPPAPHLPPSSTSSAVASSSETSSRLPAPTPSDFQLQFPPSQGPHKSPTPPPTLHLVPEPAAPPPPPPRTFQMVTTPFPALPQPKALLERFHQVPSGIILQNKAGGAPAAPQTSTSLGPLTSPAASVLVSGQAPSGTPTAPSHAPAPAPMAATGLPPLLPAENKAFASNLPTLNVAKAASSGPGKPSGLQYESKLSGLKKPPTLQPSKEACFLEHLHKHQGSVLHPDYKTAFPSFEDALHRLLPYHVYQGALPSPSDYHKVDEEFETVSTQLLKRTQAMLNKYRLLLLEESRRVSPSAEMVMIDRMFIQEEKTTLALDKQLAKEKPDEYVSSSRSLGLPIAASSEGHRLPGHGPLSSSAPGASTQPPPHLPTKLVIRHGGAGGSPSVTWARASSSLSSSSSSSSAASSLDADEDGPMPSRNRPPIKTYEARSRIGLKLKIKQEAGLSKVVHNTALDPVHQPPPPPATLKVAEPPPRPPPPPPPTGQMNGTVDHPPPAAPERKPLGTAPHCPRLPLRKTYRENVGGPGAPEGTPAGRARGGSPAPLPAKVDEATSGLIRELAAVEDELYQRMLKGPPPEPAASAAQGTGDPDWEAPGLPPAKRRKSESPDVDQASFSSDSPQDDTLTEHLQSAIDSILNLQQAPGRTPAPSYPHAASAGTPASPPPLHRPEAYPPSSHNGGLGARTLTR

SEQ ID NO: 265 - protein, 514 aa, Homo sapiens
MGRPESAGGGSRGPFEGGGRARRAGGIFLTLSILRTRDLPSGAMSEGVDLIDIYADEEFNQDPEFNNTDQIDLYDDVLTATSQPSDDRSSSTEPPPPVRQEPSPKPNNKTPAILYTYSGLRNRRAAVYVGSFSWWTTDQQLIQVIRSIGVYDVVELKFAENRANGQSKGYAEVVVASENSVHKLLELLPGKVLNGEKVDVRPATRQNLSQFEAQARKRECVRVPRGGIPPRAHSRDSSDSADGRATPSENLVPSSARVDKPPSVLPYFNRPPSALPLMGLPPPPIPPPPPLSSSFGVPPPPPGIHYQHLMPPPPRLPPHLAVPPPGAIPPALHLNPAFFPPPNATVGPPPDTYMKASAPYNHHGSRDSGPPPSTVSEAEFEDIMKRNRAISSSAISKAVSGASAGDYSDAIETLLTAIAVIKQSRVANDERCRVLISSLKDCLHGIEAKSYSVGASGSSSRKRHRSRERSPSRSRESSRRHRDLLHNEDRHDDYFQERNREHERHRDRERDRHH

SEQ ID NO: 266 - protein, 471 aa, Homo sapiens
MSEGVDLIDIYADEEFNQDPEFNNTDQIDLYDDVLTATSQPSDDRSSSTEPPPPVRQEPSPKPNNKTPAILYTYSGLRNRRAAVYVGSFSWWTTDQQLIQVIRSIGVYDVVELKFAENRANGQSKGYAEVVVASENSVHKLLELLPGKVLNGEKVDVRPATRQNLSQFEAQARKRECVRVPRGGIPPRAHSRDSSDSADGRATPSENLVPSSARVDKPPSVLPYFNRPPSALPLMGLPPPPIPPPPPLSSSFGVPPPPPGIHYQHLMPPPPRLPPHLAVPPPGAIPPALHLNPAFFPPPNATVGPPPDTYMKASAPYNHHGSRDSGPPPSTVSEAEFEDIMKRNRAISSSAISKAVSGASAGDYSDAIETLLTAIAVIKQSRVANDERCRVLISSLKDCLHGIEAKSYSVGASGSSSRKRHRSRERSPSRSRESSRRHRDLLHNEDRHDDYFQERNREHERHRDRERDRHH

SEQ ID NO: 267 - protein, 146 aa, Homo sapiens
MSEGVDLIDIYADEEFNQDPEFNNTDQIDLYDDVLTATSQPSDDRSSSTEPPPPVRQEPSPKPNNKTPAILYTYSGLRNRRAAVYVGSFSWWTTDQQLIQVIRSIGVYDVVELKFAENRANGQSKGYAEVVVASENSVHKLLELLP

SEQ ID NO: 268 - protein, 205 aa, Homo sapiens
MSEGVDLIDIYADEEFNQDPEFNNTDQIDLYDDVLTATSQPSDDRSSSTEPPPPVRQEPSPKPNNKTPAILYTYSGLRNRRAAVYVGSFSWWTTDQQLIQVIRSIGVYDVVELKFAENRANGQSKGYAEVVVASENSVHKLLELLPGKVLNGEKVDVRPATRQNLSQFEAQARKRIPPRAHSRDSSDSADGRATPSENLVPSSAR

SEQ ID NO: 269 - protein, 462 aa, Homo sapiens
MSEGVDLIDIYADEEFNQDPEFNNTDQIDLYDDVLTATSQPSDDRSSSTEPPPPVRQEPSPKPNNKTPAILYTYSGLRNRRAAVYVGSFSWWTTDQQLIQVIRSIGVYDVVELKFAENRANGQSKGYAEVVVASENSVHKLLELLPGKVLNGEKVDVRPATRQNLSQFEAQARKRIPPRAHSRDSSDSADGRATPSENLVPSSARVDKPPSVLPYFNRPPSALPLMGLPPPPIPPPPPLSSSFGVPPPPPGIHYQHLMPPPPRLPPHLAVPPPGAIPPALHLNPAFFPPPNATVGPPPDTYMKASAPYNHHGSRDSGPPPSTVSEAEFEDIMKRNRAISSSAISKAVSGASAGDYSDAIETLLTAIAVIKQSRVANDERCRVLISSLKDCLHGIEAKSYSVGASGSSSRKRHRSRERSPSRSRESSRRHRDLLHNEDRHDDYFQERNREHERHRDRERDRHH

SEQ ID NO: 270 - protein, 374 aa, Homo sapiens
MSEGVDLIDIYADEEFNQDPEFNNTDQIDLYDDVLTATSQPSDDRSSSTEPPPPVRQEPSPKPNNKTPAILYTYSGLRNRRAAVYVGSFSWWTTDQQLIQVIRSIGVYDVVELKFAENRANGQSKGYAEVVVASENSVHKLLELLPGKVLNGEKVDVRPATRQNLSQFEAQARKRIPPRAHSRDSSDSADGRATPSENLVPSSARVDKPPSVLPYFNRPPSALPLMVGPPPDTYMKASAPYNHHGSRDSGPPPSTVSEAEFEDIMKRNRAISSSAISKAVSGASAGDYSDAIETLLTAIAVIKQSRVANDERCRVLISSLKDCLHGIEAKSYSVGASGSSSRKRHRSRERSPSRSRESSRRHRDLLHNEDRHDD

SEQ ID NO: 271 - protein, 144 aa, Homo sapiens
MSEGVDLIDIYADEEFNQDPEFNNTDQIDLYDDVLTATSQPSDDRSSSTEPPPPVRQEPSPKPNNKTPAILYTYSGLRNRRAAVYVGSFSWWTTDQQLIQVIRSIGVYDVVELKFAENRANGQSKGYAEVVVASENSVHKLLEL

SEQ ID NO: 272 - protein, 138 aa, Homo sapiens
MSEGVDLIDIYADEEFNQDPEFNNTDQIDLYDDVLTATSQPSDDRSSSTEPPPPVRQEPSPKPNNKTPAILYTYSGLRNRRAAVYVGSFSWWTTDQQLIQVIRSIGVYDVVELKFAENRANGQSKGYAEVVVASENSV

SEQ ID NO: 273 - protein, 101 aa, Homo sapiens
MSEGVDLIDIYADEEFNQDPEFNNTDQIDLYDDVLTATSQPSDDRSSSTEPPPPVRQEPSPKPNNKTPAILYTYSGLRNRRAAVYVGSFSWVGLISERELS

SEQ ID NO: 274 - protein, 100 aa, Homo sapiens
MSEGVDLIDIYADEEFNQDPEFNNTDQIDLYDDVLTATSQPSDDRSSSTEPPPPVRQEPSPKPNNKTPAILYTYSGLRNRRAAVYVGSFSWGHLRDEISE

SEQ ID NO: 275 - protein, 98 aa, Homo sapiens
MSEGVDLIDIYADEEFNQDPEFNNTDQIDLYDDVLTATSQPSDDRSSSTEPPPPVRQEPSPKPNNKTPAILYTYSGLRNRRAAVYVGSFSWESMMWWS

SEQ ID NO: 276 - protein, 102 aa, Homo sapiens
MSEGVDLIDIYADEEFNQDPEFNNTDQIDLYDDVLTATSQPSDDRSSSTEPPPPVRQEPSPKPNNKTPAILYTYSGLRNRRAAVYVGSFSWWTTDQQLIQVC

SEQ ID NO: 277 - protein, 93 aa, Homo sapiens
MSEGVDLIDIYADEEFNQDPEFNNTDQIDLYDDVLTATSQPSDDRSSSTEPPPPVRQEPSPKPNNKTPAILYTYSGLRNRRAAVYVGSFSWVC

SEQ ID NO: 278 - protein, 288 aa, Homo sapiens
MSEGVDLIDIYADEEFNQDPEFNNTDQIDLYDDVLTATSQPSDDRSSSTEPPPPVRQEPSPKPNNKTPAILYTYSGLRNRRAAVYVGSFSWWTTDQQLIQVIRSIGVYDVVELKFAENRANGQSKGYAEVVVASENSVHKLLELLPGKVLNGEKVDVRPATRQNLSQFEAQARKRIPPRAHSRDSSDSADGRATPSENLVPSSARVDKPPSVLPYFNRPPSALPLMGLPPPPIPPPPPLSSSFGVPPPPPGIHYQHLMPPPPRLPPHLAVPPPGAIPPALHLNPAFFP

SEQ ID NO: 279 - protein, 101 aa, Homo sapiens
MSEGVDLIDIYADEEFNQDPEFNNTDQIDLYDDVLTATSQPSDDRSSSTEPPPPVRQEPSPKPNNKTPAILYTYSGLRNRRAAVYVGSFSWQGHLRDEISE

SEQ ID NO: 280 - protein, 219 aa, Homo sapiens
MSEGVDLIDIYADEEFNQDPEFNNTDQIDLYDDVLTATSQPSDDRSSSTEPPPPVRQEPSPKPNNKTPAILYTYSGLRNRRAAVYVGSFSWWTTDQQLIQVIRSIGVYDVVELKFAENRANGQSKGYAEVVVASENSVHKLLELLPGKVLNGEKVDVRPATRQNLSQFEAQARKRIPPRAHSRDSSDSADGRATPSENLVPSSARVDKPPSVLPYFNRP

SEQ ID NO: 281 - protein, 668 aa, Homo sapiens
MAANMYRVGDYVYFENSSSNPYLVRRIEELNKTANGNVEAKVVCLFRRRDISSSLNSLADSNAREFEEESKQPGVSEQQRHQLKHRELFLSRQFESLPATHIRGKCSVTLLNETDILSQYLEKEDCFFYSLVFDPVQKTLLADQGEIRVGCKYQAEIPDRLVEGESDNRNQQKMEMKVWDPDNPLTDRQIDQFLVVARAVGTFARALDCSSSIRQPSLHMSAAAASRDITLFHAMDTLQRNGYDLAKAMSTLVPQGGPVLCRDEMEEWSASEAMLFEEALEKYGKDFNDIRQDFLPWKSLASIVQFYYMWKTTDRYIQQKRLKAAEADSKLKQVYIPTYTKPNPNQIISVGSKPGMNGAGFQKGLTCESCHTTQSAQWYAWGPPNMQCRLCASCWIYWKKYGGLKTPTQLEGATRGTTEPHSRGHLSRPEAQSLSPYTTSANRAKLLAKNRQTFLLQTTKLTRLARRMCRDLLQPRRAARRPYAPINANAIKAECSIRLPKAAKTPLKIHPLVRLPLATIVKDLVAQAPLKPKTPRGTKTPINRNQLSQNRGLGGIMVKRAYETMAGAGVPFSANGRPLASGIRSSSQPAAKRQKLNPADAPNPVVFVATKDTRALRKALTHLEMRRAARRPNLPLKVKPTLIAVRPPVPLPAPSHPASTNEPIVLED

SEQ ID NO: 282 - protein, 495 aa, Homo sapiens
MEMKVWDPDNPLTDRQIDQFLVVARAVGTFARALDCSSSIRQPSLHMSAAAASRDITLFHAMDTLQRNGYDLAKAMSTLVPQGGPVLCRDEMEEWSASEAMLFEEALEKYGKDFNDIRQDFLPWKSLASIVQFYYMWKTTDRYIQQKRLKAAEADSKLKQVYIPTYTKPNPNQIISVGSKPGMNGAGFQKGLTCESCHTTQSAQWYAWGPPNMQCRLCASCWIYWKKYGGLKTPTQLEGATRGTTEPHSRGHLSRPEAQSLSPYTTSANRAKLLAKNRQTFLLQTTKLTRLARRMCRDLLQPRRAARRPYAPINANAIKAECSIRLPKAAKTPLKIHPLVRLPLATIVKDLVAQAPLKPKTPRGTKTPINRNQLSQNRGLGGIMVKRAYETMAGAGVPFSANGRPLASGIRSSSQPAAKRQKLNPADAPNPVVFVATKDTRALRKALTHLEMRRAARRPNLPLKVKPTLIAVRPPVPLPAPSHPASTNEPIVLED

SEQ ID NO: 283 - protein, 397 aa, Homo sapiens
MNAGSDPVVIVSAARTIIGSFNGALAAVPVQDLGSTVIKEVLKRATVAPEDVSEVIFGHVLAAGCGQNPVRQASVGAGIPYSVPAWSCQMICGSGLKAVCLAVQSIGIGDSSIVVAGGMENMSKAPHLAYLRTGVKIGEMPLTDSILCDGLTDAFHNCHMGITAENVAKKWQVSREDQDKVAVLSQNRTENAQKAGHFDKEIVPVLVSTRKGLIEVKTDEFPRHGSNIEAMSKLKPYFLTDGTGTVTPANASGINDGAAAVVLMKKSEADKRGLTPLARIVSWSQVGVEPSIMGIGPIPAIKQAVTKAGWSLEDVDIFEINEAFAAVSAAIVKELGLNPEKVNIEGGAIALGHPLGASGCRILVTLLHTLERMGRSRGVAALCIGGGMGIAMCVQRE

SEQ ID NO: 284 - protein, 566 aa, Homo sapiens
MMQESGTETKSNGSAIQNGSGGSNHLLECGGLREGRSNGETPAVDIGAADLAHAQQQQQQALQVARQLLLQQQQQQQVSGLKSPKRNDKQPALQVPVSVAMMTPQVITPQQMQQILQQQVLSPQQLQVLLQQQQALMLQQQQLQEFYKKQQEQLQLQLLQQQHAGKQPKEQQQVATQQLAFQQQLLQMQQLQQQHLLSLQRQGLLTIQPGQPALPLQPLAQGMIPTELQQLWKEVTSAHTAEETTGNNHSSLDLTTTCVSSSAPSKTSLIMNPHASTNGQLSVHTPKRESLSHEEHPHSHPLYGHGVCKWPGCEAVCEDFQSFLKHLNSEHALDDRSTAQCRVQMQVVQQLELQLAKDKERLQAMMTHLHVKSTEPKAAPQPLNLVSSVTLSKSASEASPQSLPHTPTTPTAPLTPVTQGPSVITTTSMHTVGPIRRRYSDKYNVPISSADIAQNQEFYKNAEVRPPFTYASLIRQAILESPEKQLTLNEIYNWFTRMFAYFRRNAATWKNAVRHNLSLHKCFVRVENVKGAVWTVDEVEFQKRRPQKISGVPFAPTSHCISALSE

SEQ ID NO: 285 - protein, 114 aa, Homo sapiens
MMQESGTETKSNGSAIQNGSGGSNHLLECGGLREGRSNGETPAVDIGAADLAHAQQQQQQWHLINHQPSRSPSSWLKRLISSPWELEVLQVPLWGAVAETKMSGPVCQPNPSPF

SEQ ID NO: 286 - protein, 677 aa, Homo sapiens
MMQESGTETKSNGSAIQNGSGGSNHLLECGGLREGRSNGETPAVDIGAADLAHAQQQQQQALQVARQLLLQQQQQQQVSGLKSPKRNDKQPALQVPVSVAMMTPQVITPQQMQQILQQQVLSPQQLQVLLQQQQALMLQQQQLQEFYKKQQEQLQLQLLQQQHAGKQPKEQQQVATQQLAFQQQLLQMQQLQQQHLLSLQRQGLLTIQPGQPALPLQPLAQGMIPTELQQLWKEVTSAHTAEETTGNNHSSLDLTTTCVSSSAPSKTSLIMNPHASTNGQLSVHTPKRESLSHEEHPHSHPLYGHGVCKWPGCEAVCEDFQSFLKHLNSEHALDDRSTAQCRVQMQVVQQLELQLAKDKERLQAMMTHLHVKSTEPKAAPQPLNLVSSVTLSKSASEASPQSLPHTPTTPTAPLTPVTQGPSVITTTSMHTVGPIRRRYSDKYNVPISSADIAQNQEFYKNAEVRPPFTYASLIRQAILESPEKQLTLNEIYNWFTRMFAYFRRNAATWKNAVRHNLSLHKCFVRVENVKGAVWTVDEVEFQKRRPQKISGNPSLIKNMQSSHAYCTPLNAALQASMAENSIPLYTTASMGNPTLGNLASAIREELNGAMEHTNSNESDSSPGRSPMQAVHPVHVKEEPLDPEEAEGPLSLVTTANHSPDFDHDRDYEDEPVNEDME

SEQ ID NO: 287 - protein, 231 aa, Homo sapiens
MMTPQVITPQQMQQILQQQVLSPQQLQVLLQQQQALMLQQQQLQEFYKKQQEQLQLQLLQQQHAGKQPKEQVATQQLAFQQQLLQMQQLQQQHLLSLQRQGLLTIQPGQPALPLQPLAQGMIPTELQQLWKEVTSAHTAEETTGNNHSSLDLTTTCVSSSAPSKTSLIMNPHASTNGQLSVHTPKRESLSHEEHPHSHPLYGHGVCKWPGCEAVCEDFQSFLKHLNSEHAL

SEQ ID NO: 288 - protein, 601 aa, Homo sapiens
MMQESGTETKSNGSAIQNGSGGSNHLLECGGLREGRSNGETPAVDIGAADLAHAQQQQQQALQVARQLLLQQQQQQQVSGLKSPKRNDKQPALQQQQVATQQLAFQQQLLQMQQLQQQHLLSLQRQGLLTIQPGQPALPLQPLAQGMIPTELQQLWKEVTSAHTAEETTGNNHSSLDLTTTCVSSSAPSKTSLIMNPHASTNGQLSVHTPKRESLSHEEHPHSHPLYGHGVCKWPGCEAVCEDFQSFLKHLNSEHALDDRSTAQCRVQMQVVQQLELQLAKDKERLQAMMTHLHVKSTEPKAAPQPLNLVSSVTLSKSASEASPQSLPHTPTTPTAPLTPVTQGPSVITTTSMHTVGPIRRRYSDKYNVPISSADIAQNQEFYKNAEVRPPFTYASLIRQAILESPEKQLTLNEIYNWFTRMFAYFRRNAATWKNAVRHNLSLHKCFVRVENVKGAVWTVDEVEFQKRRPQKISGNPSLIKNMQSSHAYCTPLNAALQASMAENSIPLYTTASMGNPTLGNLASAIREELNGAMEHTNSNESDSSPGRSPMQAVHPVHVKEEPLDPEEAEGPLSLVTTANHSPDFDHDRDYEDEPVNEDME

SEQ ID NO: 289 - protein, 676 aa, Homo sapiens
MMQESGTETKSNGSAIQNGSGGSNHLLECGGLREGRSNGETPAVDIGAADLAHAQQQQQQALQVARQLLLQQQQQQQVSGLKSPKRNDKQPALQVPVSVAMMTPQVITPQQMQQILQQQVLSPQQLQVLLQQQQALMLQQQQLQEFYKKQQEQLQLQLLQQQHAGKQPKEQQQVATQQLAFQQQLLQMQQLQQQHLLSLQRQGLLTIQPGQPALPLQPLAQGMIPTELQQLWKEVTSAHTAEETTGNNHSSLDLTTTCVSSSAPSKTSLIMNPHASTNGQLSVHTPKRESLSHEEHPHSHPLYGHGVCKWPGCEAVCEDFQSFLKHLNSEHALDDRSTAQCRVQMQVVQQLELQLAKDKERLQAMMTHLHVKSTEPKAAPQPLNLVSSVTLSKSASEASPQSLPHTPTTPTAPLTPVTQGPSVITTTSMHTVGPIRRRYSDKYNVPISSDIAQNQEFYKNAEVRPPFTYASLIRQAILESPEKQLTLNEIYNWFTRMFAYFRRNAATWKNAVRHNLSLHKCFVRVENVKGAVWTVDEVEFQKRRPQKISGNPSLIKNMQSSHAYCTPLNAALQASMAENSIPLYTTASMGNPTLGNLASAIREELNGAMEHTNSNESDSSPGRSPMQAVHPVHVKEEPLDPEEAEGPLSLVTTANHSPDFDHDRDYEDEPVNEDME

SEQ ID NO: 290 - protein, 576 aa, Homo sapiens
MMTPQVITPQQMQQILQQQVLSPQQLQVLLQQQQALMLQQQLQEFYKKQQEQLQLQLLQQQHAGKQPKEQQQVATQQLAFQQQLLQMQQLQQQHLLSLQRQGLLTIQPGQPALPLQPLAQGMIPTELQQLWKEVTSAHTAEETTGNNHSSLDLTTTCVSSSAPSKTSLIMNPHASTNGQLSVHTPKRESLSHEEHPHSHPLYGHGVCKWPGCEAVCEDFQSFLKHLNSEHALDDRSTAQCRVQMQVVQQLELQLAKDKERLQAMMTHLHVKSTEPKAAPQPLNLVSSVTLSKSASEASPQSLPHTPTTPTAPLTPVTQGPSVITTTSMHTVGPIRRRYSDKYNVPISSADIAQNQEFYKNAEVRPPFTYASLIRQAILESPEKQLTLNEIYNWFTRMFAYFRRNAATWKNAVRHNLSLHKCFVRVENVKGAVWTVDEVEFQKRRPQKISGNPSLIKNMQSSHAYCTPLNAALQASMAENSIPLYTTASMGNPTLGNLASAIREELNGAMEHTNSNESDSSPGRSPMQAVHPVHVKEEPLDPEEAEGPLSLVTTANHSPDFDHDRDYEDEPVNEDME

SEQ ID NO: 291 - protein, 123 aa, Homo sapiens
MMTPQVITPQQMQQILQQQVLSPQQLQVLLQQQQALMLQQQQLQEFYKKQQEQLQLQLLQQQHAGKQPKEQQQVATQQLAFQQQLLQMQQLQQQHLLSLQRQGLLTIQPGQPALPLQPLAQGM

SEQ ID NO: 292 - protein, 36 aa, Homo sapiens
MMQESGTETKSNGSAIQNGSGGSNHLLECGGLREGR

SEQ ID NO: 293 - protein, 207 aa, Homo sapiens
  misc_feature (1)..(1): Xaa can be any naturally occurring amino acid
XALQVPVSVAMMTPQVITPQQMQQILQQQVLSPQQLQVLLQQQQALMLQQQQLQEFYKKQQEQLQLQLLQQQHAGKQPKEQQQVATQQLAFQQQLLQMQQLQQQHLLSLQRQGLLTIQPGQPALPLQPLAQGMIPTELQQLWKEVTSAHTAEETTGNNHSSLDLTTTCVSSSAPSKTSLIMNPHASTNGQLSVHTPKRERQSFHTQR

SEQ ID NO: 294 - protein, 490 aa, Homo sapiens
MQQLQQQHLLSLQRQGLLTIQPGQPALPLQPLAQGMIPTELQQLWKEVTSAHTAEETTGNNHSSLDLTTTCVSSSAPSKTSLIMNPHASTNGQLSVHTPKRESLSHEEHPHSHPLYGHGVCKWPGCEAVCEDFQSFLKHLNSEHALDDRSTAQCRVQMQVVQQLELQLAKDKERLQAMMTHLHVKSTEPKAAPQPLNLVSSVTLSKSASEASPQSLPHTPTTPTAPLTPVTQGPSVITTTSMHTVGPIRRRYSDKYNVPISSADIAQNQEFYKNAEVRPPFTYASLIRQAILESPEKQLTLNEIYNWFTRMFAYFRRNAATWKNAVRHNLSLHKCFVRVENVKGAVWTVDEVEFQKRRPQKISGNPSLIKNMQSSHAYCTPLNAALQASMAENSIPLYTTASMGNPTLGNLASAIREELNGAMEHTNSNESDSSPGRSPMQAVHPVHVKEEPLDPEEAEGPLSLVTTANHSPDFDHDRDYEDEPVNEDME

SEQ ID NO: 295 - protein, 612 aa, Homo sapiens
MMQESGTETKSNGSAIQNGSGGSNHLLECGGLREGRSNGETPAVDIGAADLAHAQQQQQQALQVARQLLLQQQQQQQVSGLKSPKRNDKQPALQVPVSVAMMTPQVITPQQMQQILQQQVLSPQQLQVLLQQQQALMLQQQLQEFYKKQQEQLQLQLLQQQHAGKQPKEQQQVATQQLAFQQQLLQMQQLQQQHLLSLQRQGLLTIQPGQPALPLQPLAQGMIPTELQQLWKEVTSAHTAEETTGNNHSSLDLTTTCVSSSAPSKTSLIMNPHASTNGQLSVHTPKRESLSHEEHPHSHPLYGHGVCKWPGCEAVCEDFQSFLKHLNSEHALDDRSTAQCRVQMQVVQQLELQLAKDKERLQAMMTHLHVKSTEPKAAPQPLNLVSSVTLSKSASEASPQSLPHTPTTPTAPLTPVTQGPSVITTTSMHTVGPIRRRYSDKYNVPISSADIAQNQEFYKNAEVRPPFTYASLIRQAILESPEKQLTLNEIYNWFTRMFAYFRRNAATWKASMAENSIPLYTTASMGNPTLGNLASAIREELNGAMEHTNSNESDSSPGRSPMQAVHPVHVKEEPLDPEEAEGPLSLVTTANHSPDFDHDRDYEDEPVNEDME

SEQ ID NO: 296 - protein, 410 aa, Homo sapiens
MMTPQVITPQQMQQILQQQVLSPQQLQVLLQQQQALMLQQQQLQEFYKKQQEQLQLQLLQQQHAGKQPKEQQQVATQQLAFQQQLLQMQQLQQQHLLSLQRQGLLTIQPGQPALPLQPLAQGMIPTELQQLWKEVTSAHTAEETTGNNHSSLDLTTTCVSSSAPSKTSLIMNPHASTNGQLSVHTPKRESLSHEEHPHSHPLYGHGVCKWPGCEAVCEDFQSFLKHLNSEHALDDRSTAQCRVQMQVVQQLELQLAKDKERLQAMMTHLHVKSTEPKAAPQPLNLVSSVTLSKSASEASPQSLPHTPTTPTAPLTPVTQGPSVITTTSMHTVGPIRRRYSDKYNVPISSADIAQNQEFYKNAEVRPPFTYASLIRQAILESPEKQLTLNEIYNWFTRMFAYFRRNAATWK

SEQ ID NO: 297 - protein, 334 aa, Homo sapiens
MMQESGTETKSNGSAIQNGSGGSNHLLECGGLREGRSNGETPAVDIGAADLAHAQQQQQQALQVARQLLLQQQQQQQVSGLKSPKRNDKQPALQVPVSVAMMTPQVITPQQMQQILQQQVLSPQQLQVLLQQQQALMLQQQLQEFYKKQQEQLQLQLLQQQHAGKQPKEQQQVATQQLAFQQQLLQMQQLQQQHLLSLQRQGLLTIQPGQPALPLQPLAQGMIPTELQQLWKEVTSAHTAEETTGNNHSSLDLTTTCVSSSAPSKTSLIMNPHASTNGQLSVHTPKRESLSHEEHPHSHPLYGHGVCKWPGCEAVCEDFQSFLNLQKTKNACKP

SEQ ID NO: 298 - protein, 577 aa, Homo sapiens
MMTPQVITPQQMQQILQQQVLSPQQLQVLLQQQQALMLQQQQLQEFYKKQQEQLQLQLLQQQHAGKQPKEQQQVATQQLAFQQQLLQMQQLQQQHLLSLQRQGLLTIQPGQPALPLQPLAQGMIPTELQQLWKEVTSAHTAEETTGNNHSSLDLTTTCVSSSAPSKTSLIMNPHASTNGQLSVHTPKRESLSHEEHPHSHPLYGHGVCKWPGCEAVCEDFQSFLKHLNSEHALDDRSTAQCRVQMQVVQQLELQLAKDKERLQAMMTHLHVKSTEPKAAPQPLNLVSSVTLSKSASEASPQSLPHTPTTPTAPLTPVTQGPSVITTTSMHTVGPIRRRYSDKYNVPISSADIAQNQEFYKNAEVRPPFTYASLIRQAILESPEKQLTLNEIYNWFTRMFAYFRRNAATWKNAVRHNLSLHKCFVRVENVKGAVWTVDEVEFQKRRPQKISGNPSLIKNMQSSHAYCTPLNAALQASMAENSIPLYTTASMGNPTLGNLASAIREELNGAMEHTNSNESDSSPGRSPMQAVHPVHVKEEPLDPEEAEGPLSLVTTANHSPDFDHDRDYEDEPVNEDME

SEQ ID NO: 299 - protein, 17 aa, Homo sapiens
MMQESGTETKSNGSAIQ

SEQ ID NO: 300 - protein, 676 aa, Homo sapiens
MMQESGTETKSNGSAIQNGSGGSNHLLECGGLREGRSNGETPAVDIGAADLAHAQQQQQQALQVARQLLLQQQQQQQVSGLKSPKRNDKQPALQVPVSVAMMTPQVITPQQMQQILQQQVLSPQQLQVLLQQQQALMLQQQLQEFYKKQQEQLQLQLLQQQHAGKQPKEQQQVATQQLAFQQQLLQMQQLQQQHLLSLQRQGLLTIQPGQPALPLQPLAQGMIPTELQQLWKEVTSAHTAEETTGNNHSSLDLTTTCVSSSAPSKTSLIMNPHASTNGQLSVHTPKRESLSHEEHPHSHPLYGHGVCKWPGCEAVCEDFQSFLKHLNSEHALDDRSTAQCRVQMQVVQQLELQLAKDKERLQAMMTHLHVKSTEPKAAPQPLNLVSSVTLSKSASEASPQSLPHTPTTPTAPLTPVTQGPSVITTTSMHTVGPIRRRYSDKYNVPISSADIAQNQEFYKNAEVRPPFTYASLIRQAILESPEKQLTLNEIYNWFTRMFAYFRRNAATWKNAVRHNLSLHKCFVRVENVKGAVWTVDEVEFQKRRPQKISGNPSLIKNMQSSHAYCTPLNAALQASMAENSIPLYTTASMGNPTLGNLASAIREELNGAMEHTNSNESDSSPGRSPMQAVHPVHVKEEPLDPEEAEGPLSLVTTANHSPDFDHDRDYEDEPVNEDME

SEQ ID NO: 301 - protein, 672 aa, Homo sapiens
MMQESGTETKSNGSAIQNGSGGSNHLLECGGLREGRSNGETPAVDIGAADLAHAQQQQQQVARQLLLQQQQQQQVSGLKSPKRNDKQPALQVPVSVAMMTPQVITPQQMQQILQQQVLSPQQLQVLLQQQQALMLQQQLQEFYKKQQEQLQLQLLQQQHAGKQPKEQQQVATQQLAFQQQLLQMQQLQQQHLLSLQRQGLLTIQPGQPALPLQPLAQGMIPTELQQLWKEVTSAHTAEETTGNNHSSLDLTTTCVSSSAPSKTSLIMNPHASTNGQLSVHTPKRESLSHEEHPHSHPLYGHGVCKWPGCEAVCEDFQSFLKHLNSEHALDDRSTAQCRVQMQVVQQLELQLAKDKERLQAMMTHLHVKSTEPKAAPQPLNLVSSVTLSKSASEASPQSLPHTPTTPTAPLTPVTQGPSVITTTSMHTVGPIRRRYSDKYNVPISSDIAQNQEFYKNAEVRPPFTYASLIRQAILESPEKQLTLNEIYNWFTRMFAYFRRNAATWKNAVRHNLSLHKCFVRVENVKGAVWTVDEVEFQKRRPQKISGNPSLIKNMQSSHAYCTPLNAALQASMAENSIPLYTTASMGNPTLGNLASAIREELNGAMEHTNSNESDSSPGRSPMQAVHPVHVKEEPLDPEEAEGPLSLVTTANHSPDFDHDRDYEDEPVNEDME

SEQ ID NO: 302 - protein, 148 aa, Homo sapiens
MMQESGTETKSNGSAIQNGSGGSNHLLECGGLREGRSNGETPAVDIGAADLAHAQQQQQQALQVARQLLLQQQQQQQVSGLKSPKRNDKQPALQVPVSVAMMTPQVITPQQMQQILQQQVLSPQQLQVLLQQQQALMLQQQQLQEFYK

SEQ ID NO: 303 - protein, 210 aa, Homo sapiens
MMTPQVITPQQMQQILQQQVLSPQQLQVLLQQQQALMLQQQLQEFYKKQQEQLQLQLLQQQHAGKQPKEQQQVATQQLAFQQQLLQMQQLQQQHLLSLQRQGLLTIQPGQPALPLQPLAQGMIPTELQQLWKEVTSAHTAEETTGNNHSSLDLTTTCVSSSAPSKTSLIMNPHASTNGQLSVHTPKRESLSHEEHPHSHPLYGHGVCKWP

SEQ ID NO: 304 - protein, 576 aa, Homo sapiens; identical to SEQ ID NO: 290

SEQ ID NO: 305 - protein, 73 aa, Homo sapiens
MMTPQVITPQQMQQILQQQVLSPQQLQVLLQQQQALMLQQQQLQEFYKKQQEQLQLQLLQQQHAGKQPKEFVP

SEQ ID NO: 306 - protein, 693 aa, Homo sapiens
MMQESGTETKSNGSAIQNGSGGSNHLLECGGLREGRSNGETPAVDIGAADLAHAQQQQQQALQVARQLLLQQQQQQQVSGLKSPKRNDKQPALQVPVSVAMMTPQVITPQQMQQILQQQVLSPQQLQVLLQQQQALMLQQQQLQEFYKKQQEQLQLQLLQQQHAGKQPKEQQQVATQQLAFQQQLLQMQQLQQQHLLSLQRQGLLTIQPGQPALPLQPLAQGMIPTELQQLWKEVTSAHTAEETTGNNHSSLDLTTTCVSSSAPSKTSLIMNPHASTNGQLSVHTPKRESLSHEEHPHSHPLYGHGVCKWPGCEAVCEDFQSFLKHLNSEHALDDRSTAQCRVQMQVVQQLELQLAKDKERLQAMMTHLHVKSTEPKAAPQPLNLVSSVTLSKSASEASPQSLPHTPTTPTAPLTPVTQGPSVITTTSMHTVGPIRRRYSDKYNVPISSADIAQNQEFYKNAEVRPPFTYASLIRQAILESPEKQLTLNEIYNWFTRMFAYFRRNAATWKGAIRTNLSLHKCFIRVEDEFGSFWTVDDEEFKRGRHIQRGRPRKYCPDENFDELVAHNPSLIKNMQSSHAYCTPLNAALQASMAENSIPLYTTASMGNPTLGNLASAIREELNGAMEHTNSNESDSSPGRSPMQAVHPVHVKEEPLDPEEAEGPLSLVTTANHSPDFDHDRDYEDEPVNEDME

SEQ ID NO: 307 - protein, 75 aa, Homo sapiens
MMQESGTETKSNGSAIQNGSGGSNHLLECGGLREGRSNGETPAVDIGAADLAHAQQQQQQALQVARQLLLQQQQQ

SEQ ID NO: 308 - protein, 675 aa, Homo sapiens
MMQESGTETKSNGSAIQNGSGGSNHLLECGGLREGRSNGETPAVDIGAADLAHAQQQQQQALQVARQLLLQQQQQQQVSGLKSPKRNDKQPALQVPVSVAMMTPQVITPQQMQQILQQQVLSPQQLQVLLQQQQALMLQQQLQEFYKKQQEQLQLQLLQQQHAGKQPKEQQQVATQQLAFQQQLLQMQQLQQQHLLSLQRQGLLTIQPGQPALPLQPLAQGMIPTELQQLWKEVTSAHTAEETTGNNHSSLDLTTTCVSSSAPSKTSLIMNPHASTNGQLSVHTPKRESLSHEEHPHSHPLYGHGVCKWPGCEAVCEDFQSFLKHLNSEHALDDRSTAQCRVQMQVVQQLELQLAKDKERLQAMMTHLHVKSTEPKAAPQPLNLVSSVTLSKSASEASPQSLPHTPTTPTAPLTPVTQGPSVITTTSMHTVGPIRRRYSDKYNVPISSDIAQNQEFYKNAEVRPPFTYASLIRQAILESPEKQLTLNEIYNWFTRMFAYFRRNAATWKNAVRHNLSLHKCFVRVENVKGAVWTVDEVEFQKRRPQKISGNPSLIKNMQSSHAYCTPLNAALQASMAENSIPLYTTASMGNPTLGNLASAIREELNGAMEHTNSNESDSSPGRSPMQAVHPVHVKEEPLDPEEAEGPLSLVTTANHSPDFDHDRDYEDEPVNEDME

SEQ ID NO: 309 - protein, 210 aa, Homo sapiens
MQQLQQQHLLSLQRQGLLTIQPGQPALPLQPLAQGMIPTELQQLWKEVTSAHTAEETTGNNHSSLDLTTTCVSSSAPSKTSLIMNPHASTNGQLSVHTPKRESLSHEEHPHSHPLYGHGVCKWPGCEAVCEDFQSFLKHLNSEHALDDRSTAQCRVQMQVVQQLELQLAKDKERLQAMMTHLHVKSTEPKAAPQPLNLVSSVTLSKSASE

SEQ ID NO: 310 - protein, 628 aa, Homo sapiens
MMQESGTETKSNGSAIQNGSGGSNHLLECGGLREGRSNGETPAVDIGAADLAHAQQQQQQALQVARQLLLQQQQQQQVSGLKSPKRNDKQPALQVPVSVAMMTPQVITPQQMQQILQQQVLSPQQLQVLLQQQQALMLQQQQLQEFYKKQQEQLQLQLLQQQHAGKQPKEQQQVATQQLAFQQQLLQMQQLQQQHLLSLQRQGLLTIQPGQPALPLQPLAQGMIPTELQQLWKEVTSAHTAEETTGNNHSSLDLTTTCVSSSAPSKTSLIMNPHASTNGQLSVHTPKRESLSHEEHPHSHPLYGHGVCKWPGCEAVCEDFQSFLKHLNSEHALDDRSTAQCRVQMQVVQQLELQLAKDKERLQAMMTHLHVKSTEPKAAPQPLNLVSSVTLSKSASEASPQSLPHTPTTPTAPLTPVTQGPSVITTTSMHTVGPIRRRYSDKYNVPISSADIAQNQEFYKNAEVRPPFTYASLIRQAILESPEKQLTLNEIYNWFTRMFAYFRRNAATWKNAVRHNLSLHKCFVRVENVKGAVWTVDEVEFQKRRPQKISGNPSLIKNMQSSHAYCTPLNAALQASMAENSIPLYTTASMGNPTLGNLASAIREELNGAMEHTNSNESDSSPGRSPMQ

SEQ ID NO: 311 - protein, 57 aa, Homo sapiens
MMQESGTETKSNGSAIQNGSGGSNHLLECGGLREGRSNGETPAVDIGAADLAHAQQQ

SEQ ID NO: 312 - protein, 576 aa, Homo sapiens
MMTPQVITPQQMQQILQQQVLSPQQLQVLLQQQQALMLQQQQLQEFYKKQQEQLQLQLLQQQHAGKQPKEQQQVATQQLAFQQQLLQMQQLQQQHLLSLQRQGLLTIQPGQPALPLQPLAQGMIPTELQQLWKEVTSAHTAEETTGNNHSSLDLTTTCVSSSAPSKTSLIMNPHASTNGQLSVHTPKRESLSHEEHPHSHPLYGHGVCKWPGCEAVCEDFQSFLKHLNSEHALDDRSTAQCRVQMQVVQQLELQLAKDKERLQAMMTHLHVKSTEPKAAPQPLNLVSSVTLSKSASEASPQSLPHTPTTPTAPLTPVTQGPSVITTTSMHTVGPIRRRYSDKYNVPISSDIAQNQEFYKNAEVRPPFTYASLIRQAILESPEKQLTLNEIYNWFTRMFAYFRRNAATWKNAVRHNLSLHKCFVRVENVKGAVWTVDEVEFQKRRPQKISGNPSLIKNMQSSHAYCTPLNAALQASMAENSIPLYTTASMGNPTLGNLASAIREELNGAMEHTNSNESDSSPGRSPMQAVHPVHVKEEPLDPEEAEGPLSLVTTANHSPDFDHDRDYEDEPVNEDME

SEQ ID NO: 313 - protein, 89 aa, Homo sapiens
MMQESGTETKSNGSAIQNGSGGSNHLLECGGLREGRSNGETPAVDIGAADLAHAQQQQQQALQVARQLLLQQQQQQQVSGLKSPKRNDK

SEQ ID NO: 314 - protein, 335 aa, Homo sapiens
MMQESGTETKSNGSAIQNGSGGSNHLLECGGLREGRSNGETPAVDIGAADLAHAQQQQQQALQVARQLLLQQQQQQQVSGLKSPKRNDKQPALQVPVSVAMMTPQVITPQQMQQILQQQVLSPQQLQVLLQQQQALMLQQQQLQEFYKKQQEQLQLQLLQQQHAGKQPKEQQQVATQQLAFQQQLLQMQQLQQQHLLSLQRQGLLTIQPGQPALPLQPLAQGMIPTELQQLWKEVTSAHTAEETTGNNHSSLDLTTTCVSSSAPSKTSLIMNPHASTNGQLSVHTPKRESLSHEEHPHSHPLYGHGVCKWPGCEAVCEDFQSFLNLQKTKNACKP

SEQ ID NO: 315 - protein, 468 aa, Homo sapiens
MQQLQQQHLLSLQRQGLLTIQPGQPALPLQPLAQGMIPTELQQLWKEVTSAHTAEETTGNNHSSLDLTTTCVSSSAPSKTSLIMNPHASTNGQLSVHTPKRESLSHEEHPHSHPLYGHGVCKWPGCEAVCEDFQSFLKHLNSEHALDDRSTAQCRVQMQVVQQLELQLAKDKERLQAMMTHLHVKSTEPKAAPQPLNLVSSVTLSKSASEASPQSLPHTPTTPTAPLTPVTQGPSVITTTSMHTVGPIRRRYSDKYNVPISSADIAQNQEFYKNAEVRPPFTYASLIRQAILESPEKQLTLNEIYNWFTRMFAYFRRNAATWKNAVRHNLSLHKCFVRVENVKGAVWTVDEVEFQKRRPQKISGNPSLIKNMQSSHAYCTPLNAALQASMAENSIPLYTTASMGNPTLGNLASAIREELNGAMEHTNSNESDSSPGRSPMQAVHPVHVKEEPLDPEEAEGPLSLVTTA

SEQ ID NO: 316 - protein, 679 aa, Homo sapiens
MFQCVFSSSVLQPHSTSCLFKHLFYHSATPASQKQPEPIYSKKTEIQRQTVRAPFAKLFIFSALQVARQLLLQQQQQQQVSGLKSPKRNDKQPALQVPVSVAMMTPQVITPQQMQQILQQQVLSPQQLQVLLQQQQALMLQQQQLQEFYKKQQEQLQLQLLQQQHAGKQPKEQQQVATQQLAFQQQLLQMQQLQQQHLLSLQRQGLLTIQPGQPALPLQPLAQGMIPTELQQLWKEVTSAHTAEETTGNNHSSLDLTTTCVSSSAPSKTSLIMNPHASTNGQLSVHTPKRESLSHEEHPHSHPLYGHGVCKWPGCEAVCEDFQSFLKHLNSEHALDDRSTAQCRVQMQVVQQLELQLAKDKERLQAMMTHLHVKSTEPKAAPQPLNLVSSVTLSKSASEASPQSLPHTPTTPTAPLTPVTQGPSVITTTSMHTVGPIRRRYSDKYNVPISSADIAQNQEFYKNAEVRPPFTYASLIRQAILESPEKQLTLNEIYNWFTRMFAYFRRNAATWKNAVRHNLSLHKCFVRVENVKGAVWTVDEVEFQKRRPQKISGNPSLIKNMQSSHAYCTPLNAALQASMAENSIPLYTTASMGNPTLGNLASAIREELNGAMEHTNSNESDSSPGRSPMQAVHPVHVKEEPLDPEEAEGPLSLVTTANHSPDFDHDRDYEDEPVNEDME

SEQ ID NO: 317 - protein, 177 aa, Homo sapiens
MLALEAAQLDGPHFSCLYPDGVFYDLDSCKHSSYPDSEGAPDSLWDWTVAPPVPATPYEAFDPAAAAFSHPQAAQLCYEPPTYSPAGNLELAPSLEAPGPGLPAYPTENFASQTLVPPAYAPYPSPVLSEEEDLPLDSPALEVSDSESDEALVAGPEGKGSEGLARSCACTSSCWGY

SEQ ID NO: 318 - protein, 171 aa, Homo sapiens
MASSMTWTAASIPATLIQRGLLTLVPPAYAPYPSPVLSEEEDLPLDSPALEVSDSESDEALVAGPEGKGSEAGTRKKLRLYQFLLGLLTRGDMRECVWWVEPGAGVFQFSSKHKELLARRWGQQKGNRKRMTYQKLARALRNYAKTGEIRKVKRKLTYQFDSALLPAVRRA

SEQ ID NO: 319 - protein, 127 aa, Homo sapiens
MLALEAAQFRWLEAASACPCVSPPPGSTGHTSAVCTQMASSMTWTAASIPATLIQRGLLTPCGTGLWPHLSQPPPMKPSTRQQPLLATPRLPSSATNPPPTALQGTSNWPPAWRPRGLASLHTPRRT

SEQ ID NO: 320 - protein, 77 aa, Homo sapiens
MLALEAAQLDGPHFSCLYPDGVFYDLDSCKHSSYPDSEGAPDPGSPGICPVPQPCAIRGGRLTVGQPCPGGLGQRVG

SEQ ID NO: 321 - protein, 262 aa, Homo sapiens
MLALEAAQLDGPHFSCLYPDGVFYDLDSCKHSSYPDSEGAPDSLWDWTVAPPVPATPYEAFDPAAAAFSHPQAAQLCYEPPTYSPAGNLELAPSLEAPGPGLPAYPTENFASQTLVPPAYAPYPSPVLSEEEDLPLDSPALEVSDSESDEALVAGPEGKGSEAGTRKKLRLYQFLLGLLTRGDMRECVWWVEPGAGVFQFSSKHKELLARRWGQQKGNRKRMTYQKLARALRNYAKTGEIRKVKRKLTYQFDSALLPAVRRA

SEQ ID NO: 322 - protein, 137 aa, Homo sapiens
MLALEAAQLDGPHFSCLYPDGVFYDLDSCKHSSYPDSEGAPDSLWDWTVAPPVPATPYEAFDPAAAAFSHPQAAQLCYEPPTYSPAGNLELAPSLEAPGPGLPAYPTENFASQPCAIRGGRLTVGQPCPGGLGQRVG

SEQ ID NO: 323 - protein, 1226 aa, Homo sapiens
MDSFDLALLQEWDLESLCVYEPDRNALRRKERERRNQETQQDDGTFNSSYSLFSEPYKTNKGDELSNRIQNTLGNYDEMKDFLTDRSNQSHLVGVPKPGVPQTPVNKIDEHFVADSRAQNQPSSICSTTTSTPAAVPVQQSKRGTMGWQKAGHPPSDGQQRATQQGSLRTLLGDGVGRQQPRAKQVCNVEVGLQTQERPPAMAAKHSSSGHCVQNFPPSLASKPSLVQQKPTAYVRPMDGQDQAPDESPKLKSSSETSVHCTSYRGVPASKPEPARAKAKLSKFSIPKQGEESRSGETNSCVEEIIREMTWLPPLSAIQAPGKVEPTKFPFPNKDSQLVSSGHNNPKKGDAEPESPDNGTSNTSMLEDDLKLSSDEEENEQQAAQRTALRALSDSAVVQQPNCRTSVPSSKGSSSSSSSGSSSSSSDSESSSGSDSETESSSSESEGSKPPHFSSPEAEPASSNKWQLDKWLNKVNPHKPPILIQNESHGSESNQYYNPVKEDVQDCGKVPDVCQPSLREKEIKSTCKEEQRPRTANKAPGSKGVKQKSPPAAVAVAVSAAAPPPAVPCAPAENAPAPARRSAGKKPTRRTERTSAGDGANCHRPEEPAAADALGTSVVVPPEPTKTRPCGNNRASHRKELRSSVTCEKRRTRGLSRIVPKSKEFIETESSSSSSSSDSDLESEQEEYPLSKAQTVAASASSGNDQRLKEAAANGGSGPRAPVGSINARTTSDIAKELEEQFYTLVPFGRNELLSPLKDSDEIRSLWVKIDLTLLSRIPEHLPQEPGVLSAPATKDSESAPPSHTSDTPAEKALPKSKRKRKCDNEDDYREIKKSQGEKDSSSRLATSTSNTLSANHCNMNINSVAIPINKNEKMLRSPISPLSDASKHKYTSEDLTSSSRPNGNSLFTSASSSKKPKADSQLQPHGGDLTKAAHNNSENIPLHKSRPQTKPWSPGSNGHRDCKRQKLVFDDMPRSADYFMQEAKRMKHKADAMVEKFGKALNYAEAALSFIECGNAMEQGPMESKSPYTMYSETVELIRYAMRLKTHSGPNATPEDKQLAALCYRCLALLYWRMFRLKRDHAVKYSKALIDYFKNSSKAAQAPSPWGASGKSTGTPSPMSPNPSPASSVGSQGSLSNASALSPSTIVSIPQRIHQMAANHVSITNSILHSYDYWEMADNLAKENREFFNDLDLLMGPVTLHSSMEHLVQYSQQGLHWLRNSAHLS

SEQ ID NO: 324 - protein, 1251 aa, Homo sapiens
MDSFDLALLQEWDLESLWGEDILNQRNDSLVVEFQSSASRCRSVYEPDRNALRRKERERRNQETQQDDGTFNSSYSLFSEPYKTNKGDELSNRIQNTLGNYDEMKDFLTDRSNQSHLVGVPKPGVPQTPVNKIDEHFVADSRAQNQPSSICSTTTSTPAAVPVQQSKRGTMGWQKAGHPPSDGQQRATQQGSLRTLLGDGVGRQQPRAKQVCNVEVGLQTQERPPAMAAKHSSSGHCVQNFPPSLASKPSLVQQKPTAYVRPMDGQDQAPDESPKLKSSSETSVHCTSYRGVPASKPEPARAKAKLSKFSIPKQGEESRSGETNSCVEEIIREMTWLPPLSAIQAPGKVEPTKFPFPNKDSQLVSSGHNNPKKGDAEPESPDNGTSNTSMLEDDLKLSSDEEENEQQAAQRTALRALSDSAVVQQPNCRTSVPSSKGSSSSSSSGSSSSSSDSESSSGSDSETESSSSESEGSKPPHFSSPEAEPASSNKWQLDKWLNKVNPHKPPILIQNESHGSESNQYYNPVKEDVQDCGKVPDVCQPSLREKEIKSTCKEEQRPRTANKAPGSKGVKQKSPPAAVAVAVSAAAPPPAVPCAPAENAPAPARRSAGKKPTRRTERTSAGDGANCHRPEEPAAADALGTSVVVPPEPTKTRPCGNNRASHRKELRSSVTCEKRRTRGLSRIVPKSKEFIETESSSSSSSSDSDLESEQEEYPLSKAQTVAASASSGNDQRLKEAAANGGSGPRAPVGSINARTTSDIAKELEEQFYTLVPFGRNELLSPLKDSDEIRSLWVKIDLTLLSRIPEHLPQEPGVLSAPATKDSESAPPSHTSDTPAEKALPKSKRKRKCDNEDDYREIKKSQGEKDSSSRLATSTSNTLSANHCNMNINSVAIPINKNEKMLRSPISPLSDASKHKYTSEDLTSSSRPNGNSLFTSASSSKKPKADSQLQPHGGDLTKAAHNNSENIPLHKSRPQTKPWSPGSNGHRDCKRQKLVFDDMPRSADYFMQEAKRMKHKADAMVEKFGKALNYAEAALSFIECGNAMEQGPMESKSPYTMYSETVELIRYAMRLKTHSGPNATPEDKQLAALCYRCLALLYWRMFRLKRDHAVKYSKALIDYFKNSSKAAQAPSPWGASGKSTGTPSPMSPNPSPASSVGSQGSLSNASALSPSTIVSIPQRIHQMAANHVSITNSILHSYDYWEMADNLAKENREFFNDLDLLMGPVTLHSSMEHLVQYSQQGLHWLRNSAHLS

SEQ ID NO: 325 - protein, 17 aa, Homo sapiens
MDSFDLALLQEWDLESL

SEQ ID NO: 326 - protein, 165 aa, Homo sapiens
MDSFDLALLQEWDLESLWGEDILNQRNDSLVVEFQSSASRCRSVYEPDRNALRRKERERRNQETQQDDGTFNSSYSLFSEPYKTNKGDELSNRIQNTLGNYDEMKDFLTDRSNQSHLVGVPKPGVPQTPVNKIDEHFVADSRAQNQPSSICSTTTSTPAAVPVQQ

SEQ ID NO: 327 - protein, 129 aa, Homo sapiens
MDSFDLALLQEWDLESLCVYEPDRNALRRKERERRNQETQQDDGTFNSSYSLFSEPYKTNKGDELSNRIQNTLGNYDEMKDFLTDRSNQSHLVGVPKPGVPQTPVNKIDEHFVADSRAQNQPSSICSTT

SEQ ID NO: 328 - protein, 99 aa, Homo sapiens
MDSFDLALLQEWDLESLCVYEPDRNALRRKERERRNQETQQDDGTFNSSYSLFSEPYKTNKGDELSNRIQNTLGNYDEMKDFLTDRSNQSHLVGVPKPG

SEQ ID NO: 329 - protein, 580 aa, Homo sapiens
GNNRASHRKELRSSVTCEKRRTRGLSRIVPKSKEFIETESSSSSSSSDSDLESEQEEYPLSKAQTVAASASSGNDQRLKEAAANGGSGPRAPVGSINARTTSDIAKELEEQFYTLVPFGRNELLSPLKDSDEIRSLWVKIDLTLLSRIPEHLPQEPGVLSAPATKDSESAPPSHTSDTPAEKALPKSKRKRKCDNEDDYREIKKSQGEKDSSSRLATSTSNTLSANHCNMNINSVAIPINKNEKMLRSPISPLSDASKHKYTSEDLTSSSRPNGNSLFTSASSSKKPKADSQLQPHGGDLTKAAHNNSENIPLHKSRPQTKPWSPGSNGHRDCKRQKLVFDDMPRSADYFMQEAKRMKHKADAMVEKFGKALNYAEAALSFIECGNAMEQGPMESKSPYTMYSETVELIRYAMRLKTHSGPNATPEDKQLAALCYRCLALLYWRMFRLKRDHAVKYSKALIDYFKNSSKAAQAPSPWGASGNSVGSQGSLSNASALSPSTIVSIPQRIHQMAANHVSITNSILHSYDYWEMADNLAKENREFFNDLDLLMGPVTLHSSMEHLVQYSQQGLHWLRNSAHLS

SEQ ID NO: 330 - protein, 179 aa, Homo sapiens
  misc_feature (1)..(1): Xaa can be any naturally occurring amino acid
XASKPSLVQQKPTAYVRPMDGQDQAPDESPKLKSSSETSVHCTSYRGVPASKPEPARAKAKLSKFSIPKQGEESRSGETNSCVEEIIREMTWLPPLSAIQAPGKVEPTKFPFPNKDSQLVSSGHNNPKKGDAEPESPDNGTSNTSMLEDDLKLSSDEEENEQQAAQRTALRALSDSLSW

SEQ ID NO: 331 - protein, 161 aa, Homo sapiens
MDSFDLALLQEWDLESLCVYEPDRNALRRKERERRNQETQQDDGTFNSSYSLFSEPYKTNKGDELSNRIQNTLGNYDEMKDFLTDRSNQSHLVGVPKPGVPQTPVNKIDEHFVADSRAQNQPSSICSTTTSTPAAVPVQQSKRGTMGWQKAGHPPSDGQQR

SEQ ID NO: 332 - protein, 54 aa, Homo sapiens
MDSFDLALLQEWDLESLWGEDILNQRNDSLVVEFQSSASRCRSVYEPDRNALRR

SEQ ID NO: 333 - protein, 103 aa, Homo sapiens
MDSFDLALLQEWDLESLWGEDILNQRNDSLVVEFQSSASRCRSVYEPDRNALRRKERERRNQETQQDDGTFNSSYSLFSEPYKTNKGDELSNRIQNTLGNYDE

SEQ ID NO: 334 - protein, 114 aa, Homo sapiens
MDSFDLALLQEWDLESLCVYEPDRNALRRKERERRNQETQQDDGTFNSSYSLFSEPYKTNKGDELSNRIQNTLGNYDEMKDFLTDRSNQSHLVGVPKPGVPQTPVNKIDEHFVA

SEQ ID NO: 335 - protein, 379 aa, Homo sapiens
MDSFDLALLQEWDLESLWGEDILNQRNDSLVVEFQSSASRCRSVYEPDRNALRRKERERRNQETQQDDGTFNSSYSLFSEPYKTNKGDELSNRIQNTLGNYDEMKDFLTDRSNQSHLVGVPKPGVPQTPVNKIDEHFVADSRAQNQPSSICSTTTSTPAAVPVQQSKRGTMGWQKAGHPPSDGQQRATQQGSLRTLLGDGVGRQQPRAKQVCNVEVGLQTQERPPAMAAKHSSSGHCVQNFPPSLASKPSLVQQKPTAYVRPMDGQDQAPDESPKLKSSSETSVHCTSYRGVPASKPEPARAKAKLSKFSIPKQGEESRSGETNSCVEEIIRYPRVCFSNAVQTEPALPGPGCTGHSLWRICSVGPPGAGRRQPTCLCA

SEQ ID NO: 336 - protein, 115 aa, Homo sapiens
MDSFDLALLQEWDLESLWGEDILNQRNDSLVVEFQSSASRCRSVYEPDRNALRRKERERRNQETQQDDGTFNSSYSLFSEPYKTNKGDELSNRIQNTLGNYDEMKDFLTDRSNQS

SEQ ID NO: 337 - protein, 608 aa, Homo sapiens
MDSFDLALLQEWDLESLCVYEPDRNALRRKERERRNQETQQDDGTFNSSYSLFSEPYKTNKGDELSNRIQNTLGNYDEMKDFLTDRSNQSHLVGVPKPGVPQTPVNKIDEHFVADSRAQNQPSSICSTTTSTPAAVPVQQSKRGTMGWQKAGHPPSDGQQRATQQGSLRTLLGDGVGRQQPRAKQVCNVEVGLQTQERPPAMAAKHSSSGHCVQNFPPSLASKPSLVQQKPTAYVRPMDGQDQAPDESPKLKSSSETSVHCTSYRGVPASKPEPARAKAKLSKFSIPKQGEESRSGETNSCVEEIIREMTWLPPLSAIQAPGKVEPTKFPFPNKDSQLVSSGHNNPKKGDAEPESPDNGTSNTSMLEDDLKLSSDEEENEQQAAQRTALRALSDSAVVQQPNCRTSVPSSKGSSSSSSSGSSSSSSDSESSSGSDSETESSSSESEGSKPPHFSSPEAEPASSNKWQLDKWLNKVNPHKPPILIQNESHGSESNQYYNPVKEDVQDCGKVPDVCQPSLREKEIKSTCKEEQRPRTANKAPGSKGVKQKSPPAAVAVAVSAAAPPPAVPCAPAENAPAPARRSAGKKPTRRTERTSAGDGANCHRPEEP

SEQ ID NO: 338 - protein, 43 aa, Homo sapiens
MDSFDLALLQEWDLESLCVYEPDRNALRRKERERRNQETQQDD

SEQ ID NO: 339 - protein, 134 aa, Homo sapiens
  misc_feature (1)..(1): Xaa can be any naturally occurring amino acid
XSAPPSHTSDTPAEKALPKSKRKRKCDNEDDYREIKKSQGEKDSSSRLATSTSNTLSANHCNMNINSVAIPINKNEKMLRSPISPLSDASKHKYTSEDLTSSSRPNGNSLFTSASSSKKPKADSQLQPHGGDLT

SEQ ID NO: 340 - protein, 143 aa, Homo sapiens
MDSFDLALLQEWDLESLWGEDILNQRNDSLVVEFQSSASRCRSVYEPDRNALRRKERERRNQETQQDDGTFNSSYSLFSEPYKTNKGDELSNRIQNTLGNYDEMKDFLTDRSNQSHLVGVPKPGVPQTPVNKIDEHFVADSRA

SEQ ID NO: 341 - protein, 329 aa, Homo sapiens
MAALGGDGLRLLSVSRPERPPESAALGGLGPGLCCWVSVFSCLSLACSYVGSLYVWKSELPRDHPAVIKRRFTSVLVVSSLSPLCVLLWRELTGIQPGTSLLTLMGFRLEGIFPAALLPLLLTMILFLGPLMQLSMDCPCDLADGLKVVLAPRSWARCLTDMRWLRNQVIAPLTEELVFRACMLPMLAPCMGLGPAVFTCPLFFGVAHFHHIIEQLRFRQSSVGNIFLSAAFQFSYTAVFGAYTAFLFIRTGHLIGPVLCHSFCNYMGFPAVCAALEHPQRRPLLAGYALGVGLFLLLLQPLTDPKLYGSLPLCVLLERAGDSEAPLCS

SEQ ID NO: 342 - protein, 102 aa, Homo sapiens
MAALGGDGLRLLSVSRPERPPESAALGGLGPGLCCWVSVFSCLSLACSYVGSLYVWKSELPRDHPAVIKRRFTSVLVVSSLSPLCVLLWRELTGIQAHPCSP

SEQ ID NO: 343 - protein, 308 aa, Homo sapiens
MAALGGDGLRLLSVSRPERPPESAALGGLGPGLCCWVSVFSCLSLACSYVGSLYVWKSELPRDHPAVIKRRFTSVLVVSSLSPLCVLLWRELTGIQPGTSLLTLMGFRLEGIFPAALLPLLLTMILFLGPLMQLSMDCPCDLADGLKVVLAPRSWARCLTDMRWLRNQVIAPLTEELVFRACMLPMLAPCMGLGPAVFTCPLFFGVAHFHHIIEQLRFRQSSVGNIFLSAGHLIGPVLCHSFCNYMGFPAVCAALEHPQRRPLLAGYALGVGLFLLLLQPLTDPKLYGSLPLCVLLERAGDSEAPLCS

SEQ ID NO: 344 - protein, 206 aa, Homo sapiens
MILFLGPLMQLSMDCPCDLADGLKVVLAPRSWARCLTDMRWLRNQVIAPLTEELVFRACMLPMLAPCMGLGPAVFTCPLFFGVAHFHHIIEQLRFRQSSVGNIFLSAAFQFSYTAVFGAYTAFLFIRTGHLIGPVLCHSFCNYMGFPAVCAALEHPQRRPLLAGYALGVGLFLLLLQPLTDPKLYGSLPLCVLLERAGDSEAPLCS

SEQ ID NO: 345 - protein, 1154 aa, Homo sapiens
MQYLNIKEDCNAMAFCAKMRSSKKTEVNLEAPEPGVEVIFYLSDREPLRLGSGEYTAEELCIRAAQACRISPLCHNLFALYDENTKLWYAPNRTITVDDKMSLRLHYRMRFYFTNWHGTNDNEQSVWRHSPKKQKNGYEKKKIPDATPLLDASSLEYLFAQGQYDLVKCLAPIRDPKTEQDGHDIENECLGMAVLAISHYAMMKKMQLPELPKDISYKRYIPETLNKSIRQRNLLTRMRINNVFKDFLKEFNNKTICDSSVSTHDLKVKYLATLETLTKHYGAEIFETSMLLISSENEMNWFHSNDGGNVLYYEVMVTGNLGIQWRHKPNVVSVEKEKNKLKRKKLENKHKKDEEKNKIREEWNNFSYFPEITHIVIKESVVSINKQDNKKMELKLSSHEEALSFVSLVDGYFRLTADAHHYLCTDVAPPLIVHNIQNGCHGPICTEYAINKLRQEGSEEGMYVLRWSCTDFDNILMTVTCFEKSEQVQGAQKQFKNFQIEVQKGRYSLHGSDRSFPSLGDLMSHLKKQILRTDNISFMLKRCCQPKPREISNLLVATKKAQEWQPVYPMSQLSFDRILKKDLVQGEHLGRGTRTHIYSGTLMDYKDDEGTSEEKKIKVILKVLDPSHRDISLAFFEAASMMRQVSHKHIVYLYGVCVRDVENIMVEEFVEGGPLDLFMHRKSDVLTTPWKFKVAKQLASALSYLEDKDLVHGNVCTKNLLLAREGIDSECGPFIKLSDPGIPITVLSRQECIERIPWIAPECVEDSKNLSVAADKWSFGTTLWEICYNGEIPLKDKTLIEKERFYESRCRPVTPSCKELADLMTRCMNYDPNQRPFFRAIMRDINKLEEQNPDIVSEKKPATEVDPTHFEKRFLKRIRDLGEGHFGKVELCRYDPEGDNTGEQVAVKSLKPESGGNHIADLKKEIEILRNLYHENIVKYKGICTEDGGNGIKLIMEFLPSGSLKEYLPKNKNKINLKQQLKYAVQICKGMDYLGSRQYVHRDLAARNVLVESEHQVKIGDFGLTKAIETDKEYYTVKDDRDSPVFWYAPECLMQSKFYIASDVWSFGVTLHELLTYCDSDSSPMALFLKMIGPTHGQMTVTRLVNTLKEGKRLPCPPNCPDEVYQLMRKCWEFQPSNRTSFQNLIEGFEALLK

SEQ ID NO: 346 - protein, 708 aa, Homo sapiens
MQYLNIKEDCNAMAFCAKMRSSKKTEVNLEAPEPGVEVIFYLSDREPLRLGSGEYTAEELCIRAAQACRISPLCHNLFALYDENTKLWYAPNRTITVDDKMSLRLHYRMRFYFTNWHGTNDNEQSVWRHSPKKQKNGYEKKKIPDATPLLDASSLEYLFAQGQYDLVKCLAPIRDPKTEQDGHDIENECLGMAVLAISHYAMMKKMQLPELPKDISYKRYIPETLNKSIRQRNLLTRMRINNVFKDFLKEFNNKTICDSSVSTHDLKVKYLATLETLTKHYGAEIFETSMLLISSENEMNWFHSNDGGNVLYYEVMVTGNLGIQWRHKPNVVSVEKEKNKLKRKKLENKHKKDEEKNKIREEWNNFSYFPEITHIVIKESVVSINKQDNKKMELKLSSHEEALSFVSLVDGYFRLTADAHHYLCTDVAPPLIVHNIQNGCHGPICTEYAINKLRQEGSEEGMYVLRWSCTDFDNILMTVTCFEKSEQVQGAQKQFKNFQIEVQKGRYSLHGSDRSFPSLGDLMSHLKKQILRTDNISFMLKRCCQPKPREISNLLVATKKAQEWQPVYPMSQLSFDRILKKDLVQGEHLGRGTRTHIYSGTLMDYKDDEGTSEEKKIKVILKVLDPSHRDISLAFFEAASMMRQVSHKHIVYLYGVCVRDVESKCVLFQRGGWPGWGAWVLWRWWRLFPPSRCPGFLPFFLQLRRLRD

SEQ ID NO: 347 - protein, 1152 aa, Homo sapiens
MQYLNIKEDCNAMAFCAKMRSSKKTEVNLEAPEPGVEVIFYLSDREPLRLGSGEYTAEELCIRAAQACRISPLCHNLFALYDENTKLWYAPNRTITVDDKMSLRLHYRMRFYFTNWHGTNDNEQSVWRHSPKKQKNGYEKKKIPDATPLLDASSLEYLFAQGQYDLVKCLAPIRDPKTEQDGHDIENECLGMAVLAISHYAMMKKMQLPELPKDISYKRYIPETLNKSIRQRNLLTRMRINNVFKDFLKEFNNKTICDSSVSTHDLKVKYLATLETLTKHYGAEIFETSMLLISSENEMNWFHSNDGGNVLYYEVMVTGNLGIQWRHKPNVVSVEKEKNKLKRKKLENKHKKDEEKNKIREEWNNFSYFPEITHIVIKESVVSINKQDNKKMELKLSSHEEALSFVSLVDGYFRLTADAHHYLCTDVAPPLIVHNIQNGCHGPICTEYAINKLRQEGSEEGMYVLRWSCTDFDNILMTVTCFEKSEQVQGAQKQFKNFQIEVQKGRYSLHGSDRSFPSLGDLMSHLKKQILRTDNISFMLKRCCQPKPREISNLLVATKKAQEWQPVYPMSQLSFDRILKKDLVQGEHLGRGTRTHIYSGTLMDYKDDEGTSEEKKIKVILKVLDPSHRDISLAFFEAASMMRQVSHKHIVYLYGVCVRDVENIMVEEFVEGGPLDLFMHRKSDVLTTPWKFKVAKQLASALSYLEDKDLVHGNVCTKNLLLAREGIDSECGPFIKLSDPGIPITVLSRQECIERIPWIAPECVEDSKNLSVAADKWSFGTTLWEICYNGEIPLKDKTLIEKERFYESRCRPVTPSCKELADLMTRCMNYDPNQRPFFRAIMRDINKLEEQNIVSEKKPATEVDPTHFEKRFLKRIRDLGEGHFGKVELCRYDPEGDNTGEQVAVKSLKPESGGNHIADLKKEIEILRNLYHENIVKYKGICTEDGGNGIKLIMEFLPSGSLKEYLPKNKNKINLKQQLKYAVQICKGMDYLGSRQYVHRDLAARNVLVESEHQVKIGDFGLTKAIETDKEYYTVKDDRDSPVFWYAPECLMQSKFYIASDVWSFGVTLHELLTYCDSDSSPMALFLKMIGPTHGQMTVTRLVNTLKEGKRLPCPPNCPDEVYQLMRKCWEFQPSNRTSFQNLIEGFEALLK

SEQ ID NO: 348 - protein, 87 aa, Homo sapiens
MQYLNIKEDCNAMAFCAKMRSSKKTEVNLEAPEPGVEVIFYLSDREPLRLGSGEYTAEELCIRAAQACQWLLSAPSLMNYKIPGDDA

SEQ ID NO: 349 - protein, 468 aa, Homo sapiens
  misc_feature (1)..(1): Xaa can be any naturally occurring amino acid
XLYGVCVRDVENIMVEEFVEGGPLDLFMHRKSDVLTTPWKFKVAKQLASALSYLEDKDLVHGNVCTKNLLLAREGIDSECGPFIKLSDPGIPITVLSRQECIERIPWIAPECVEDSKNLSVAADKWSFGTTLWEICYNGEIPLKDKTLIEKERFYESRCRPVTPSYPDIVSEKKPATEVDPTHFEKRFLKRIRDLGEGHFGKVELCRYDPEGDNTGEQVAVKSLKPESGGNHIADLKKEIEILRNLYHENIVKYKGICTEDGGNGIKLIMEFLPSGSLKEYLPKNKNKINLKQQLKYAVQICKGMDYLGSRQYVHRDLAARNVLVESEHQVKIGDFGLTKAIETDKEYYTVKDDRDSPVFWYAPECLMQSKFYIASDVWSFGVTLHELLTYCDSDSSPMALFLKMIGPTHGQMTVTRLVNTLKEGKRLPCPPNCPDEVYQLMRKCWEFQPSNRTSFQNLIEGFEALLK

SEQ ID NO: 350 - protein, 1110 aa, Homo sapiens
MQYLNIKEDCNAMAFCAKMRSSKKTEVNLEAPEPGVEVIFYLSDREPLRLGSGEYTAEELCIRAAQACRISPLCHNLFALYDENTKLWYAPNRTITVDDKMSLRLHYRMRFYFTNWHGTNDNEQSVWRHSPKKQKNGYEKKKIPDATPLLDASSLEYLFAQGQYDLVKCLAPIRDPKTEQDGHDIENECLGMAVLAISHYAMMKKMQLPELPKDISVSTHDLKVKYLATLETLTKHYGAEIFETSMLLISSENEMNWFHSNDGGNVLYYEVMVTGNLGIQWRHKPNVVSVEKEKNKLKRKKLENKHKKDEEKNKIREEWNNFSYFPEITHIVIKESVVSINKQDNKKMELKLSSHEEALSFVSLVDGYFRLTADAHHYLCTDVAPPLIVHNIQNGCHGPICTEYAINKLRQEGSEEGMYVLRWSCTDFDNILMTVTCFEKSEQVQGAQKQFKNFQIEVQKGRYSLHGSDRSFPSLGDLMSHLKKQILRTDNISFMLKRCCQPKPREISNLLVATKKAQEWQPVYPMSQLSFDRILKKDLVQGEHLGRGTRTHIYSGTLMDYKDDEGTSEEKKIKVILKVLDPSHRDISLAFFEAASMMRQVSHKHIVYLYGVCVRDVENIMVEEFVEGGPLDLFMHRKSDVLTTPWKFKVAKQLASALSYLEDKDLVHGNVCTKNLLLAREGIDSECGPFIKLSDPGIPITVLSRQECIERIPWIAPECVEDSKNLSVAADKWSFGTTLWEICYNGEIPLKDKTLIEKERFYESRCRPVTPSCKELADLMTRCMNYDPNQRPFFRAIMRDINKLEEQNPDIVSEKKPATEVDPTHFEKRFLKRIRDLGEGHFGKVELCRYDPEGDNTGEQVAVKSLKPESGGNHIADLKKEIEILRNLYHENIVKYKGICTEDGGNGIKLIMEFLPSGSLKEYLPKNKNKINLKQQLKYAVQICKGMDYLGSRQYVHRDLAARNVLVESEHQVKIGDFGLTKAIETDKEYYTVKDDRDSPVFWYAPECLMQSKFYIASDVWSFGVTLHELLTYCDSDSSPMALFLKMIGPTHGQMTVTRLVNTLKEGKRLPCPPNCPDEVYQLMRKCWEFQPSNRTSFQNLIEGFEALLK

SEQ ID NO: 351 - protein, 131 aa, Homo sapiens
MQYLNIKEDCNAMAFCAKMRSSKKTEVNLEAPEPGVEVIFYLSDREPLRLGSGEYTAEELCIRAAQACRISPLCHNLFALYDENTKLWYAPNRTITVDDKMSLRLHYRMRFYFTNWHGTNDNEQSVWRHSP

SEQ ID NO: 352 - protein, 345 aa, Homo sapiens
MQYLNIKEDCNAMAFCAKMRSSKKTEVNLEAPEPGVEVIFYLSDREPLRLGSGEYTAEELCIRAAQACRISPLCHNLFALYDENTKLWYAPNRTITVDDKMSLRLHYRMRFYFTNWHGTNDNEQSVWRHSPKKQKNGYEKKKIPDATPLLDASSLEYLFAQGQYDLVKCLAPIRDPKTEQDGHDIENECLGMAVLAISHYAMMKKMQLPELPKDISYKRYIPETLNKSIRQRNLLTRMRINNVFKDFLKEFNNKTICDSSVSTHDLKVKYLATLETLTKHYGAEIFETSMLLISSENEMNWFHSNDGGNVLYYEVMVTGNLGIQWRHKPNVVSVEKEKNKLKRKK

SEQ ID NO: 353 - protein, 129 aa, Homo sapiens
MQYLNIKEDCNAMAFCAKMRSSKKTEVNLEAPEPGVEVIFYLSDREPLRLGSGEYTAEELCIRAAQACRISPLCHNLFALYDENTKLWYAPNRTITVDDKMSLRLHYRMSLCSSGEATHYVWSPQPDAV

SEQ ID NO: 354 - protein, 993 aa, Homo sapiens
  misc_feature (1)..(1): Xaa can be any naturally occurring amino acid
XNDNEQSVWRHSPKKQKNGYEKKKIPDATPLLDASSLEYLFAQGQYDLVKCLAPIRDPKTEQDGHDIENECLGMAVLAISHYAMMKKMQLPELPKDISSVSTHDLKVKYLATLETLTKHYGAEIFETSMLLISSENEMNWFHSNDGGNVLYYEVMVTGNLGIQWRHKPNVVSVEKEKNKLKRKKLENKHKKDEEKNKIREEWNNFSYFPEITHIVIKESVVSINKQDNKKMELKLSSHEEALSFVSLVDGYFRLTADAHHYLCTDVAPPLIVHNIQNGCHGPICTEYAINKLRQEGSEEGMYVLRWSCTDFDNILMTVTCFEKSEQVQGAQKQFKNFQIEVQKGRYSLHGSDRSFPSLGDLMSHLKKQILRTDNISFMLKRCCQPKPREISNLLVATKKAQEWQPVYPMSQLSFDRILKKDLVQGEHLGRGTRTHIYSGTLMDYKDDEGTSEEKKIKVILKVLDPSHRDISLAFFEAASMMRQVSHKHIVYLYGVCVRDVENIMVEEFVEGGPLDLFMHRKSDVLTTPWKFKVAKQLASALSYLEDKDLVHGNVCTKNLLLAREGIDSECGPFIKLSDPGIPITVLSRQECIERIPWIAPECVEDSKNLSVAADKWSFGTTLWEICYNGEIPLKDKTLIEKERFYESRCRPVTPSCKELADLMTRCMNYDPNQRPFFRAIMRDINKLEEQNPDIVSEKKPATEVDPTHFEKRFLKRIRDLGEGHFGKVELCRYDPEGDNTGEQVAVKSLKPESGGNHIADLKKEIEILRNLYHENIVKYKGICTEDGGNGIKLIMEFLPSGSLKEYLPKNKNKINLKQQLKYAVQICKGMDYLGSRQYVHRDLAARNVLVESEHQVKIGDFGLTKAIETDKEYYTVKDDRDSPVFWYAPECLMQSKFYIASDVWSFGVTLHELLTYCDSDSSPMALFLKMIGPTHGQMTVTRLVNTLKEGKRLPCPPNCPDEVYQLMRKCWEFQPSNRTSFQNLIEGFEALLK

SEQ ID NO: 355 - protein, 803 aa, Homo sapiens
MIPVTEFRQFSEQQPAFRVLKPWWDVFTDYLSVAMLMIGVFGCTLQVMQDKIICLPKRVQPAQNHSSLSNVSQAVASTTPLPPPKPSPANPITVEMKGLKTDLDLQQYSFINQMCYERALHWYAKYFPYLVLIHTLVFMLCSNFWFKFPGSSSKIEHFISILGKCFDSPWTTRALSEVSGEDSEEKDNRKNNMNRSNTIQSGPEDSLVNSQSLKSIPEKFVVDKSTAGALDKKEGEQAKALFEKVKKFRLHVEEGDILYAMYVRQTVLKVIKFLIIIAYNSALVSKVQFTVDCNVDIQDMTGYKNFSCNHTMAHLFSKLSFCYLCFVSIYGLTCLYTLYWLFYRSLREYSFEYVRQETGIDDIPDVKNDFAFMLHMIDQYDPLYSKRFAVFLSEVSENKLKQLNLNNEWTPDKLRQKLQTNAHNRLELPLIMLSGLPDTVFEITELQSLKLEIIKNVMIPATIAQLDNLQELSLHQCSVKIHSAALSFLKENLKVLSVKFDDMRELPPWMYGLRNLEELYLVGSLSHDISRNVTLESLRDLKSLKILSIKSNVSKIPQAVVDVSSHLQKMCIHNDGTKLVMLNNLKKMTNLTELELVHCDLERIPHAVFSLLSLQELDLKENNLKSIEEIVSFQHLRKLTVLKLWHNSITYIPEHIKKLTSLERLSFSHNKIEVLPSHLFLCNKIRYLDLSYNDIRFIPPEIGVLQSLQYFSITCNKVESLPDELYFCKKLKTLKIGKNSLSVLSPKIGNLLFLSYLDVKGNHFEILPPELGDCRALKRAGLVVEDALFETLPSDVREQMKTE

SEQ ID NO: 356 - protein, 58 aa, Homo sapiens
MIPVTEFRQFSEQQPAFRVLKPWWDVFTDYLSVAMLMIGVFGCTLQAVSLKLSGFILF

SEQ ID NO: 357 - protein, 422 aa, Homo sapiens
MPRSFLVKSKKAHSYHQPRSPGPDYSLRLENVPAPSRADSTSNAGGAKAEPRDRLSPESQLTEAPDRASASPDSCEGSVCERSSEFEDFWRPPSPSASPASEKSMCPSLDEAQPFPLPFKPYSWSGLAGSDLRHLVQSYRPCGALERGAGLGLFCEPAPEPGHPAALYGPKRAAGGAGAGAPGSCSAGAGATAGPGLGLYGDFGSAAAGLYERPTAAAGLLYPERGHGLHADKGAGVKVESELLCTRLLLGGGSYKCIKCSKVFSTPHGLEVHVRRSHSGTRPFACEMCGKTFGHAVSLEQHKAVHSQERSFDCKICGKSFKRSSTLSTHLLIHSDTRPYPCQYCGKRFHQKSDMKKHTFIHTGEKPHKCQVCGKAFSQSSNLITHSRKHTGFKPFGCDLCGKGFQRKVDLRRHRETQHGLK

SEQ ID NO: 358 - protein, 1004 aa, Homo sapiens
MVQLYNLHPFGSQQVVPCKLEPDRFCGGGRDALFVAAGCKVEAFAVAGQELCQPRCAFSTLGRVLRLAYSEAGDYLVAIEEKNKATFLRAYVNWRNKRTENSRVCIRMIGHNVEGPFSKAFRDQMYIIEMPLSEAPLCISCCPVKGDLLVGCTNKLVLFSLKYQIINEEFSLLDFERSLIIHIDNITPVEVSFCVGYVAVMSDLEVLIVKLESGPKNGERVHHHPHKTNNRIRRTEEGISNEISQLESDDFVICQKPLELLGEKSEQSGLSVTLESTGLADEKRKYSHFQHLLYRRFAPDISSYVLSDDIKLHSLQLLPIYQTGSLTSDGKNLSQEKELLSLFCFFSLPHVGYLYMVVKSVELMSVYQYPEKSQQAVLTPQFLHVITSNNLQCFTVRCSAAAAREEDPYMDTTLKACPPVSMDVCALRIQLFIGLKAICHFKNHIILLTKAEPEAIPERRQSPKRLLSRKDTSVKIKIPPVAEAGWNLYIVNTISPVQLYKEMVDYSNTYKTVKTQSCIHLLSEAHLLVRAALMDASQLEPGEKAELLEAFKESCGHLGDCYSRLDSQHSHLTLPYYKMSGLSMAEVLARTDWTVEDGLQKYERGLIFYINHSLYENLDEELNEELAAKVVQMFYVAEPKQVPHILCSPSMKNINPLTAMSYLRKLDTSGFSSILVTLTKAAVALKMGDLDMHRNEMKSHSEMKLVCGFILEPRLLIQQRKGQIVPTELALHLKETQPGLLVASVLGLQKNNKIGIEEADSFFKVLCAKDEDTIPQLLVDFWEAQLVACLPDVVLQELFFKLTSQYIWRLSKRQPPDTTPLRTSEDLINACSHYGLIYPWVHVVISSDSLADKNYTEDLSKLQSLICGPSFDIASIIPFLEPLSEDTIAGLSVHVLCRTRLKEYEQCIDILLERCPEAVIPYANHELKEENRTLWWKKLLPELCQRIKCGGEKYQLYLSSLKETLSIVAVELELKDFMNVLPEDGTATFFLPYLLYCSRKKPLT

SEQ ID NO: 359 - protein, 839 aa, Homo sapiens
MVQLYNLHPFGSQQVVPCKLEPDRFCGGGRDALFVAAGCKVEAFAVAGQELCQPRCAFSTLGRVLRLAYSEAGISNEISQLESDDFVICQKPLELLGEKSEQSGLSVTLESTGLADEKRKYSHFQHLLYRRFAPDISSYVLSDDIKLHSLQLLPIYQTGSLTSDGKNLSQEKELLSLFCFFSLPHVGYLYMVVKSVELMSVYQYPEKSQQAVLTPQFLHVITSNNLQCFTVRCSAAAAREEDPYMDTTLKACPPVSMDVCALRIQLFIGLKAICHFKNHIILLTKAEPEAIPERRQSPKRLLSRKDTSVKIKIPPVAEAGWNLYIVNTISPVQLYKEMVDYSNTYKTVKTQSCIHLLSEAHLLVRAALMDASQLEPGEKAELLEAFKESCGHLGDCYSRLDSQHSHLTLPYYKMSGLSMAEVLARTDWTVEDGLQKYERGLIFYINHSLYENLDEELNEELAAKVVQMFYVAEPKQVPHILCSPSMKNINPLTAMSYLRKLDTSGFSSILVTLTKAAVALKMGDLDMHRNEMKSHSEMKLVCGFILEPRLLIQQRKGQIVPTELALHLKETQPGLLVASVLGLQKNNKIGIEEADSFFKVLCAKDEDTIPQLLVDFWEAQLVACLPDVVLQELFFKLTSQYIWRLSKRQPPDTTPLRTSEDLINACSHYGLIYPWVHVVISSDSLADKNYTEDLSKLQSLICGPSFDIASIIPFLEPLSEDTIAGLSVHVLCRTRLKEYEQCIDILLERCPEAVIPYANHELKEENRTLWWKKLLPELCQRIKCGGEKYQLYLSSLKETLSIVAVELELKDFMNVLPEDGTATFFLPYLLYCSRKKPLT

SEQ ID NO: 360 - protein, 266 aa, Homo sapiens
ELAAKVVQMFYVAEPKQVPHILCSPSMKNINPLTAMSYLRKLDTSGFSSILVTLTKAAVALKMGDLDMHRNEMKSHSEMKLVCGFILEPRLLIQQRKGQIVPTELALHLKETQPGLLVASVLGLQKNNKIGIEEADSFFKVLCAKDEDTIPQLLVDFWEAQLVACLPDVVLQELFFKLTSQYIWRLSKRQPPDTTPLRTSEDLINACSHYGLIYPWVHVVISSDSLADKNYTEDLSKLQLPLFRSWSHFQKTLLPASVSMFCVVHA

SEQ ID NO: 361 - protein, 1237 aa, Homo sapiens
MGDMKTPDFDDLLAAFDIPDIDANEAIHSGPEENEGPGGPGKPEPGVGSESEDTAAASAGDGPGVPAQASDHGLPPPDISVVSVIVKNTVCPEQSEALAGGSAGDGAQAAGVTKEGPVGPHRMQNGFGSPEPSLPGTPHSPAPPSGGTWKEKGMEGKTPLDLFAHFGPEPGDHSDPLPPSAPSPTREGALTPPPFPSSFELAQENGPGMQPPVSSPPLGALKQESCSPHHPQVLAQQGSGSSPKATDIPASASPPPVAGVPFFKQSPGHQSPLASPKVPVCQPLKEEDDDEGPVDKSSPGSPQSPSSGAEAADEDSNDSPASSSSRPLKVRIKTIKTSCGNITRTVTQVPSDPDPPAPLAEGAFLAEASLLKLSPATPTSEGPKVVSVQLGDGTRLKGTVLPVATIQNASTAMLMAASVARKAVVLPGGTATSPKMIAKNVLGLVPQALPKADGRAGLGTGGQKVNGASVVMVQPSKTATGPSTGGGTVISRTQSSLVEAFNKILNSKNLLPAYRPNLSPPAEAGLALPPTGYRCLECGDAFSLEKSLARHYDRRSMRIEVTCNHCARRLVFFNKCSLLLHAREHKDKGLVMQCSHLVMRPVALDQMVGQPDITPLLPVAVPPVSGPLALPALGKGEGAITSSAITTVAAEAPVLPLSTEPPAAPATSAYTCFRCLECKEQCRDKAGMAAHFQQLGPPAPGATSNVCPTCPMMLPNRCSFSAHQRMHKNRPPHVCPECGGNFLQANFQTHLREACLHVSRRVGYRCPSCSVVFGGVNSIKSHIQTSHCEVFHKCPICPMAFKSGPSAHAHLYSQHPSFQTQQAKLIYKCAMCDTVFTHKPLLSSHFDQHLLPQRVSVFKCPSCPLLFAQKRTMLEHLKNTHQSGRLEETAGKGAGGALLTPKTEPEELAVSQGGAAPATEESSSSSEEEEVPSSPEPPRPAKRPRRELGSKGLKGGGGGPGGWTCGLCHSWFPERDEYVAHMKKEHGKSVKKFPCRLCERSFCSAPSLRRHVRVNHEGIKRVYPCRYCTEGKRTFSSRLILEKHVQVRHGLQLGAQSPGRGTTLARGSSARAQGPGRKRRQSSDSCSEEPDSTTPPAKSPRGGPGSGGHGPLRYRSSSSTEQSLMMGLRVEDGAQQCLDCGLCFASPGSLSRHRFISHKKRRGVGKASALGLGDGEEEAPPSRSDPDGGDSPLPASGGPLTCKVCGKSCDSPLNLKTHFRTHGMAFIRARQGAVGDN

SEQ ID NO: 362 - protein, 99 aa, Homo sapiens
RTFSSRLILEKHVQVRHGLQLGAQSPGRGTTLARGSSARAQFLPLFFRGQVGNAASLLTLAVRSLTARHRQPSPPGADLDLEAMALCATGAAAPQNRAS

SEQ ID NO: 363 - protein, 706 aa, Homo sapiens
  misc_feature (1)..(1): Xaa can be any naturally occurring amino acid
XTVLPVATIQNASTAMLMAASVARKAVVLPGGTATSPKMIAKNVLGLVPQALPKADGRAGLGTGGQKVNGASVVMVQPSKTATGPSTGGGTVISRTQSSLVEAFNKILNSKNLLPAYRPNLSPPAEAGLALPPTGYRCLECGDAFSLEKSLARHYDRRSMRIEVTCNHCARRLVFFNKCSLLLHAREHKDKGLVMQCSHLVMRPVALDQMVGQPDITPLLPVAVPPVSGPLALPALGKGEGAITSSAITTVAAEAPVLPLSTEPPAAPATSAYTCFRCLECKEQCRDKAGMAAHFQQLGPPAPGATSNVCPTCPMMLPNRCSFSAHQRMHKNRPPHVCPECGGNFLQANFQTHLREACLHVSRRVGYRCPSCSVVFGGVNSIKSHIQTSHCEVFHKCPICPMAFKSGPSAHAHLYSQHPSFQTQQAKLIYKCAMCDTVFTHKPLLSSHFDQHLLPQRVSVFKCPSCPLLFAQKRTMLEHLKNTHQSGRLEETAGKGAGGALLTPKTEPEELAVSQGGAAPATEESSSSSEEEEVPSSPEPPRPAKRPRRELGSKGLKGGGGGPGGWTCGLCHSWFPERDEYVAHMKKEHGKSVKKFPCRLCERSFCSAPSLRRHVRVNHEGIKRVYPCRSKGPGLRAVPLLPSCPLPFQVLHRGKTHLQQPPDPRETCPGPARLAAWGPVPWPGDHLGSGFQCQSPGARSETPPVF

SEQ ID NO: 364 - protein, 785 aa, Homo sapiens
MGDMKTPDFDDLLAAFDIPDIDANEAIHSGPEENEGPGGPGKPEPGVGSESEDTAAASAGDGPGVPAQASDHGLPPPDISVVSVIVKNTVCPEQSEALAGGSAGDGAQAAGVTKEGPVGPHRMQNGFGSPEPSLPGTPHSPAPPSGGTWKEKGMEGKTPLDLFAHFGPEPGDHSDPLPPSAPSPTREGALTPPPFPSSFELAQENGPGMQPPVSSPPLGALKQESCSPHHPQVLAQQGSGSSPKATDIPASASPPPVAGVPFFKQSPGHQSPLASPKVPVCQPLKEEDDDEGPVDKSSPGSPQSPSSGAEAADEDSNDSPASSSSRPLKVRIKTIKTSCGNITRTVTQVPSDPDPPAPLAEGAFLAEASLLKLSPATPTSEGPKVVSVQLGDGTRLKGTVLPVATIQNASTAMLMAASVARKAVVLPGGTATSPKMIAKNVLGLVPQALPKADGRAGLGTGGQKVNGASVVMVQPSKTATGPSTGGGTVISRTQSSLVEAFNKILNSKNLLPAYRPNLSPPAEAGLALPPTGYRCLECGDAFSLEKSLARHYDRRSMRIEVTCNHCARRLVFFNKCSLLLHAREHKDKGLVMQCSHLVMRPVALDQMVGQPDITPLLPVAVPPVSGPLALPALGKGEGAITSSAITTVAAEAPVLPLSTEPPAAPATSAYTCFRCLECKEQCRDKAGMAAHFQQLGPPAPGATSNVCPTCPMMLPNRCSFSAHQRMHKNRPPHVCPECGGNFLQANFQTHLREACLHVSRRVGYRTPISLGAWRRLLGKGPGVPC

SEQ ID NO: 365 - protein, 147 aa, Homo sapiens
MGRGLGSADMGDMKTPDFDDLLAAFDIPDIDANEAIHSGPEENEGPGGPGKPEPGVGSESEDTAAASAGDGPGVPAQASDHGLPPPDISVVSVIVKNTVCPEQSEALAGGSAGDGAQAAGVTKEGPVGPHRMQNGFGSPEPSLPGTP

SEQ ID NO: 366 - protein, 161 aa, Homo sapiens
MNLAISIALLLTVLQVSRGQKVTSLTACLVDQSLRLDCRHENTSSSPIQYEFSLTRETKKHVLFGTVGVPEHTYRSRTNFTSKYNMKVLYLSAFTSKDEGTYTCALHHSGHSPPISSQNVTVLRDKLVKCEGISLLAQNTSWLLLLLLSLSLLQATDFMSL

SEQ ID NO: 367 - protein, 144 aa, Homo sapiens
MNLAISIALLLTVDQSLRLDCRHENTSSSPIQYEFSLTRETKKHVLFGTVGVPEHTYRSRTNFTSKYNMKVLYLSAFTSKDEGTYTCALHHSGHSPPISSQNVTVLRDKLVKCEGISLLAQNTSWLLLLLLSLSLLQATDFMSL

SEQ ID NO: 368 - protein, 153 aa, Homo sapiens
MNLAISIALLLTVLQVSRGQKVTSLTACLVDQSLRLDCRHENTSSSPIQYEFSLTRETKKHVLFGTVGVPEHTYRSRTNFTSKYNMKVLYLSAFTSKDEGTYTCALHHSGHSPPISSQNVTVLRDKLVKCEGISLLAQNTSWLLLLLLSLSLL

SEQ ID NO: 369 - protein, 165 aa, Homo sapiens
MNLAISIALLLTVLQVSRGQKVTSLTACLVDQSLRLDCRHENTSSSPIQYEFSLTRETKKHVLFGTVGVPEHTYRSRTNFTSKYNMKVLYLSAFTSKDEGTYTCALHHSGHSPPISSQNVTVLRGHGFHVPVTGGAHGGDRKPQVPVQRSYFSESADPLPPIPQT

SEQ ID NO: 370 - protein, 37 aa, Homo sapiens
MNLAISIALLLTGLPRAEGDQPNGLPSGPEPSSGLPP

SEQ ID NO: 371 - protein, 750 aa, Homo sapiens
MSQWYELQQLDSKFLEQVHQLYDDSFPMEIRQYLAQWLEKQDWEHAANDVSFATIRFHDLLSQLDDQYSRFSLENNFLLQHNIRKSKRNLQDNFQEDPIQMSMIIYSCLKEERKILENAQRFNQAQSGNIQSTVMLDKQKELDSKVRNVKDKVMCIEHEIKSLEDLQDEYDFKCKTLQNREHETNGVAKSDQKQEQLLLKKMYLMLDNKRKEVVHKIIELLNVTELTQNALINDELVEWKRRQQSACIGGPPNACLDQLQNWFTIVAESLQQVRQQLKKLEELEQKYTYEHDPITKNKQVLWDRTFSLFQQLIQSSFVVERQPCMPTHPQRPLVLKTGVQFTVKLRLLVKLQELNYNLKVKVLFDKDVNERNTVKGFRKFNILGTHTKVMNMEESTNGSLAAEFRHLQLKEQKNAGTRTNEGPLIVTEELHSLSFETQLCQPGLVIDLETTSLPVVVISNVSQLPSGWASILWYNMLVAEPRNLSFFLTPPCARWAQLSEVLSWQFSSVTKRGLNVDQLNMLGEKLLGPNASPDGLIPWTRFCKENINDKNFPFWLWIESILELIKKHLLPLWNDGCIMGFISKERERALLKDQQPGTFLLRFSESSREGAITFTWVERSQNGGEPDFHAVEPYTKKELSAVTFPDIIRNYKVMAAENIPENPLKYLYPNIDKDHAFGKYYSRPKEAPEPMELDGPKGTGYIKTELISVSEVHPSRLQTTDNLLPMSPEEFDEVSRIVGSVEFDSMMNTV

SEQ ID NO: 372 - protein, 712 aa, Homo sapiens
MSQWYELQQLDSKFLEQVHQLYDDSFPMEIRQYLAQWLEKQDWEHAANDVSFATIRFHDLLSQLDDQYSRFSLENNFLLQHNIRKSKRNLQDNFQEDPIQMSMIIYSCLKEERKILENAQRFNQAQSGNIQSTVMLDKQKELDSKVRNVKDKVMCIEHEIKSLEDLQDEYDFKCKTLQNREHETNGVAKSDQKQEQLLLKKMYLMLDNKRKEVVHKIIELLNVTELTQNALINDELVEWKRRQQSACIGGPPNACLDQLQNWFTIVAESLQQVRQQLKKLEELEQKYTYEHDPITKNKQVLWDRTFSLFQQLIQSSFVVERQPCMPTHPQRPLVLKTGVQFTVKLRLLVKLQELNYNLKVKVLFDKDVNERNTVKGFRKFNILGTHTKVMNMEESTNGSLAAEFRHLQLKEQKNAGTRTNEGPLIVTEELHSLSFETQLCQPGLVIDLETTSLPVVVISNVSQLPSGWASILWYNMLVAEPRNLSFFLTPPCARWAQLSEVLSWQFSSVTKRGLNVDQLNMLGEKLLGPNASPDGLIPWTRFCKENINDKNFPFWLWIESILELIKKHLLPLWNDGCIMGFISKERERALLKDQQPGTFLLRFSESSREGAITFTWVERSQNGGEPDFHAVEPYTKKELSAVTFPDIIRNYKVMAAENIPENPLKYLYPNIDKDHAFGKYYSRPKEAPEPMELDGPKGTGYIKTELISVSEV

SEQ ID NO: 373 - protein, 714 aa, Homo sapiens
MWMSQWYELQQLDSKFLEQVHQLYDDSFPMEIRQYLAQWLEKQDWEHAANDVSFATIRFHDLLSQLDDQYSRFSLENNFLLQHNIRKSKRNLQDNFQEDPIQMSMIIYSCLKEERKILENAQRFNQAQSGNIQSTVMLDKQKELDSKVRNVKDKVMCIEHEIKSLEDLQDEYDFKCKTLQNREHETNGVAKSDQKQEQLLLKKMYLMLDNKRKEVVHKIIELLNVTELTQNALINDELVEWKRRQQSACIGGPPNACLDQLQNWFTIVAESLQQVRQQLKKLEELEQKYTYEHDPITKNKQVLWDRTFSLFQQLIQSSFVVERQPCMPTHPQRPLVLKTGVQFTVKLRLLVKLQELNYNLKVKVLFDKDVNERNTVKGFRKFNILGTHTKVMNMEESTNGSLAAEFRHLQLKEQKNAGTRTNEGPLIVTEELHSLSFETQLCQPGLVIDLETTSLPVVVISNVSQLPSGWASILWYNMLVAEPRNLSFFLTPPCARWAQLSEVLSWQFSSVTKRGLNVDQLNMLGEKLLGPNASPDGLIPWTRFCKENINDKNFPFWLWIESILELIKKHLLPLWNDGCIMGFISKERERALLKDQQPGTFLLRFSESSREGAITFTWVERSQNGGEPDFHAVEPYTKKELSAVTFPDIIRNYKVMAAENIPENPLKYLYPNIDKDHAFGKYYSRPKEAPEPMELDGPKGTGYIKTELISVSEV

SEQ ID NO: 374 - protein, 150 aa, Homo sapiens
MSQWYELQQLDSKFLEQVHQLYDDSFPMEIRQYLAQWLEKQDWEHAANDVSFATIRFHDLLSQLDDQYSRFSLENNFLLQHNIRKSKRNLQDNFQEDPIQMSMIIYSCLKEERKILENAQRFNQAQSGNIQSTVMLDKQKELDSKVRNVK

SEQ ID NO: 375 - protein, 193 aa, Homo sapiens
MSQWYELQQLDSKFLEQVHQLYDDSFPMEIRQYLAQWLEKQDWEHAANDVSFATIRFHDLLSQLDDQYSRFSLENNFLLQHNIRKSKRNLQDNFQEDPIQMSMIIYSCLKEERKILENAQRFNQAQSGNIQSTVMLDKQKELDSKVRNVKDKVMCIEHEIKSLEDLQDEYDFKCKTLQNRGSSSQNNRVAECH

SEQ ID NO: 376 - protein, 70 aa, Homo sapiens
MSQWYELQQLDSKFLEQVHQLYDDSFPMEIRQYLAQWLEKQDWEHAANDVSFATIRFHDLLSQLDDQYSR

SEQ ID NO: 377 - protein, 42 aa, Homo sapiens
MSQWYELQQLDSKFLEQVHQLYDDSFPMEIRQYLAQWLEKQD

SEQ ID NO: 378 - protein, 377 aa, Homo sapiens
MSQWYELQQLDSKFLEQVHQLYDDSFPMEIRQYLAQWLEKQDWEHAANDVSFATIRFHDLLSQLDDQYSRFSLENNFLLQHNIRKSKRNLQDNFQEDPIQMSMIIYSCLKEERKILENAQRFNQCIEHEIKSLEDLQDEYDFKCKTLQNREHETNGVAKSDQKQEQLLLKKMYLMLDNKRKEVVHKIIELLNVTELTQNALINDELVEWKRRQQSACIGGPPNACLDQLQNWFTIVAESLQQVRQQLKKLEELEQKYTYEHDPITKNKQVLWDRTFSLFQQLIQSSFVVERQPCMPTHPQRPLVLKTGVQFTVKLRLLVKLQELNYNLKVKVLFDKDVNERNTVKGFRKFNILGTHTKVMNMEESTNGSLAAEFRHL

SEQ ID NO: 379 - protein, 572 aa, Homo sapiens
MSQWYELQQLDSKFLEQVHQLYDDSFPMEIRQYLAQWLEKQDWEHAANDVSFATIRFHDLLSQLDDQYSRFSLENNFLLQHNIRKSKRNLQDNFQEDPIQMSMIIYSCLKEERKILENAQRFNQAQSGNIQSTVMLDKQKELDSKVRNVKDKVMCIEHEIKSLEDLQDEYDFKCKTLQNREHETNGVAKSDQKQEQLLLKKMYLMLDNKRKEVVHKIIELLNVTELTQNALINDELVEWKRRQQSACIGGPPNACLDQLQNWFTIVAESLQQVRQQLKKLEELEQKYTYEHDPITKNKQVLWDRTFSLFQQLIQSSFVVERQPCMPTHPQRPLVLKTGVQFTVKLRLLVKLQELNYNLKVKVLFDKDVNERNTVKGFRKFNILGTHTKVMNMEESTNGSLAAEFRHLQLKEQKNAGTRTNEGPLIVTEELHSLSFETQLCQPGLVIDLETTSLPVVVISNVSQLPSGWASILWYNMLVAEPRNLSFFLTPPCARWAQLSEVLSWQFSSVTKRGLNVDQLNMLGEKLLGPNASPDGLIPWTRFCKVHHGLHQQGARACPVEGPAAGDLPAAVQ

SEQ ID NO: 380 - protein, 26 aa, Homo sapiens
RQYLAQWLEKQDWSLSSFRRPLCPLW

SEQ ID NO: 381 - protein, 748 aa, Homo sapiens
MSQWYELQQLDSKFLEQVHQLYDDSFPMEIRQYLAQWLEKQDWEHAANDVSFATIRFHDLLSQLDDQYSRFSLENNFLLQHNIRKSKRNLQDNFQEDPIQMSMIIYSCLKEERKILENAQRFNQAQSGNIQSTVMLDKQKELDSKVRNVKDKVMCIEHEIKSLEDLQDEYDFKCKTLQNREHETNGVAKSDQKQEQLLLKKMYLMLDNKRKEVVHKIIELLNVTELTQNALINDELVEWKRRQQSACIGGPPNACLDQLQNWFTIVAESLQQVRQQLKKLEELEQKYTYEHDPITKNKQVLWDRTFSLFQQLIQSSFVVERQPCMPTHPQRPLVLKTGVQFTVKLRLLVKLQELNYNLKVKVLFDKDVNERNTVKGFRKFNILGTHTKVMNMEESTNGSLAAEFRHLQLKEQKNAGTRTNEGPLIVTEELHSLSFETQLCQPGLVIDLETTSLPVVVISNVSQLPSGWASILWYNMLVAEPRNLSFFLTPPCARWAQLSEVLSWQFSSVTKRGLNVDQLNMLGEKLLGPNASPDGLIPWTRFCKENINDKNFPFWLWIESILELIKKHLLPLWNDGCIMGFISKERERALLKDQQPGTFLLRFSESSREGAITFTWVERSQNGGEPDFHAVEPYTKKELSAVTFPDIIRNYKVMAAENIPENPLKYLYPNIDKDHAFGKYYSRPKEAPEPMELDGPKGTGYIKTELISVSEVHPSRLQTTDNLLPMSPEEFDEVSRIVGSVEFDSMSF

SEQ ID NO: 382 - protein, 791 aa, Homo sapiens
MSQWYELQQLDSKFLEQVHQLYDDSFPMEIRQYLAQWLEKQDWEHAANDVSFATIRFHDLLSQLDDQYSRFSLENNFLLQHNIRKSKRNLQDNFQEDPIQMSMIIYSCLKEERKILENAQRFNQAQSGNIQSTVMLDKQKELDSKVRNVKDKVMCIEHEIKSLEDLQDEYDFKCKTLQNREHETNGVAKSDQKQEQLLLKKMYLMLDNKRKEVVHKIIELLNVTELTQNALINDELVEWKRRQQSACIGGPPNACLDQLQNWFTIVAESLQQVRQQLKKLEELEQKYTYEHDPITKNKQVLWDRTFSLFQQLIQSSFVVERQPCMPTHPQRPLVLKTGVQFTVKLRLLVKLQELNYNLKVKVLFDKDVNERNTVKGFRKFNILGTHTKVMNMEESTNGSLAAEFRHLQLKEQKNAGTRTNEGPLIVTEELHSLSFETQLCQPGLVIDLETTSLPVVVISNVSQLPSGWASILWYNMLVAEPRNLSFFLTPPCARWAQLSEVLSWQFSSVTKRGLNVDQLNMLGEKLLGPNASPDGLIPWTRFCKENINDKNFPFWLWIESILELIKKHLLPLWNDGCIMGFISKERERALLKDQQPGTFLLRFSESSREGAITFTWVERSQNGGEPDFHAVEPYTKKELSAVTFPDIIRNYKVMAAENIPENPLKYLYPNIDKDHAFGKYYSRPKEAPEPMELDGPKGTGYIKTELISVSEVHPSRLQTTDNLLPMSPEEFDEVSRIVGSVEFDSMVSTTAGLCVALNKCVCSEAGSAPWQIPGLSAGGSPGGAKESAVLR

SEQ ID NO: 383 - protein, 748 aa, Homo sapiens
MSQWYELQQLDSKFLEQVHQLYDDSFPMEIRQYLAQWLEKQDWEHAANDVSFATIRFHDLLSQLDDQYSRFSLENNFLLQHNIRKSKRNLQDNFQEDPIQMSMIIYSCLKEERKILENAQRFNQAQSGNIQSTVMLDKQKELDSKVRNVKDKVMCIEHEIKSLEDLQDEYDFKCKTLQNREHETNGVAKSDQKQEQLLLKKMYLMLDNKRKEVVHKIIELLNVTELTQNALINDELVEWKRRQQSACIGGPPNACLDQLQNWFTIVAESLQQVRQQLKKLEELEQKYTYEHDPITKNKQVLWDRTFSLFQQLIQSSFVVERQPCMPTHPQRPLVLKTGVQFTVKLRLLVKLQELNYNLKVKVLFDKDVNERNTVKGKFNILGTHTKVMNMEESTNGSLAAEFRHLQLKEQKNAGTRTNEGPLIVTEELHSLSFETQLCQPGLVIDLETTSLPVVVISNVSQLPSGWASILWYNMLVAEPRNLSFFLTPPCARWAQLSEVLSWQFSSVTKRGLNVDQLNMLGEKLLGPNASPDGLIPWTRFCKENINDKNFPFWLWIESILELIKKHLLPLWNDGCIMGFISKERERALLKDQQPGTFLLRFSESSREGAITFTWVERSQNGGEPDFHAVEPYTKKELSAVTFPDIIRNYKVMAAENIPENPLKYLYPNIDKDHAFGKYYSRPKEAPEPMELDGPKGTGYIKTELISVSEVHPSRLQTTDNLLPMSPEEFDEVSRIVGSVEFDSMMNTV

SEQ ID NO: 384 - protein, 273 aa, Homo sapiens
MSQWYELQQLDSKFLEQVHQLYDDSFPMEIRQYLAQWLEKQDWEHAANDVSFATIRFHDLLSQLDDQYSRFSLENNFLLQHNIRKSKRNLQDNFQEDPIQMSMIIYSCLKEERKILENAQRFNQAQSGNIQSTVMLDKQKELDSKVRNVKDKVMCIEHEIKSLEDLQDEYDFKCKTLQNREHETNGVAKSDQKQEQLLLKKMYLMLDNKRKEVVHKIIELLNVTELTQNALINDELVEWKRRQQSACIGGPPNACLDQLQNCCGESAASSAAA

SEQ ID NO: 385 - protein, 716 aa, Homo sapiens
MSQWYELQQLDSKFLEQVHQLYDDSFPMEIRQYLAQWLEKQDWEHAANDVSFATIRFHDLLSQLDDQYSRFSLENNFLLQHNIRKSKRNLQDNFQEDPIQMSMIIYSCLKEERKILENAQRFNQAQSGNIQSTVMLDKQKELDSKVRNVKDKVMCIEHEIKSLEDLQDEYDFKCKTLQNREHETNGVAKSDQKQEQLLLKKMYLMLDNKRKEVVHKIIELLNVTELTQNALINDELVEWKRRQQSACIGGPPNACLDQLQNWFTIVAESLQQVRQQLKKLEELEQKYTYEHDPITKNKQVLWDRTFSLFQQLIQSSFVVERQPCMPTHPQRPLVLKTGVQFTVKLRLLVKLQELNYNLKVKVLFDKDVNERNTVKGFRKFNILGTHTKVMNMEESTNGSLAAEFRHLQLKEQKNAGTRTNEGPLIVTEELHSLSFETQLCQPGLVIDLETTSLPVVVISNVSQLPSGWASILWYNMLVAEPRNLSFFLTPPCARWAQLSEVLSWQFSSVTKRGLNVDQLNMLGEKLLGPNASPDGLIPWTRFCKENINDKNFPFWLWIESILELIKKHLLPLWNDGCIMGFISKERERALLKDQQPGTFLLRFSESSREGAITFTWVERSQNGGEPDFHAVEPYTKKELSAVTFPDIIRNYKVMAAENIPENPLKYLYPNIDKDHAFGKYYSRPKEAPEPMELDGPKGTGYIKTELISVSEVTVLG

SEQ ID NO: 386 - protein, 636 aa, Homo sapiens
MSQWYELQQLDSKFLEQVHQLYDDSFPMEIRQYLAQWLEKQDWEHAANDVSFATIRFHDLLSQLDDQYSRFSLENNFLLQHNIRKSKRNLQDNFQEDPIQMSMIIYSCLKEERKILENAQRFNQAQSGNIQSTVMLDKQKELDSKVRNVKDKVMCIEHEIKSLEDLQDEYDFKCKTLQNREHETNGVAKSDQKQEQLLLKKMYLMLDNKRKEVVHKIIELLNVTELTQNALINDELVEWKRRQQSACIGGPPNACLDQLQNWFTIVAESLQQVRQQLKKLEELEQKYTYEHDPITKNKQVLWDRTFSLFQQLIQSSFVVERQPCMPTHPQRPLVLKTGVQFTVKLRLLVKLQELNYNLKVKVLFDKDVNERNTVKGFRKFNILGTHTKVMNMEESTNGSLAAEFRHLQLKEQKNAGTRTNEGPLIVTEELHSLSFETQLCQPGLVIDLETTSLPVVVISNVSQLPSGWASILWYNMLVAEPRNLSFFLTPPCARWAQLSEVLSWQFSSVTKRGLNVDQLNMLGEKLLGPNASPDGLIPWTRFCKENINDKNFPFWLWIESILELIKKHLLPLWNDGCIMGFISKERERALLKDQQPGTFLLRFSESSREGAITFTWVERSQNGGGLLSADQGCESM

SEQ ID NO: 387 - protein, 779 aa, Homo sapiens
MSQWYELQQLDSKFLEQVHQLYDDSFPMEIRQYLAQWLEKQDWEHAANDVSFATIRFHDLLSQLDDQYSRFSLENNFLLQHNIRKSKRNLQDNFQEDPIQMSMIIYSCLKEERKILENAQRFNQAQSGNIQSTVMLDKQKELDSKVRNVKDKVMCIEHEIKSLEDLQDEYDFKCKTLQNREHETNGVAKSDQKQEQLLLKKMYLMLDNKRKEVVHKIIELLNVTELTQNALINDELVEWKRRQQSACIGGPPNACLDQLQNWFTIVAESLQQVRQQLKKLEELEQKYTYEHDPITKNKQVLWDRTFSLFQQLIQSSFVVERQPCMPTHPQRPLVLKTGVQFTVKLRLLVKLQELNYNLKVKVLFDKDVNERNTVKGFRKFNILGTHTKVMNMEESTNGSLAAEFRHLQLKEQKNAGTRTNEGPLIVTEELHSLSFETQLCQPGLVIDLETTSLPVVVISNVSQLPSGWASILWYNMLVAEPRNLSFFLTPPCARWAQLSEVLSWQFSSVTKRGLNVDQLNMLGEKLLGPNASPDGLIPWTRFCKENINDKNFPFWLWIESILELIKKHLLPLWNDGCIMGFISKERERALLKDQQPGTFLLRFSESSREGAITFTWVERSQNGGEPDFHAVEPYTKKELSAVTFPDIIRNYKVMAAENIPENPLKYLYPNIDKDHAFGKYYSRPKEAPEPMELDGPKGTGYIKTELISVSEVHPSRLQTTDNLLPMSPEEFDEVSRIVGSVEFDSMALALLPRLECRAAIMAHCSLDLPSSTDPPNSAS

SEQ ID NO: 388 - protein, 127 aa, Homo sapiens [sequence omitted]

SEQ ID NO: 389 - protein, 105 aa, Homo sapiens
MSAAGARGLRATYHRLLDKVELMLPEKLRPLYNHPAGPRTVFFWAPIMKWGLVCAGLADMARPAEKLSTAQSAVLMATGFIWSRYSLVIIPKNWSLFAVNFFVGA

SEQ ID NO: 390 - protein, 142 aa, Homo sapiens
MAAVVAATALKGRGARNARVLRGILAGATANKASHNRTRALQSHSSPEGKEEPEPLSPELEYIPRKRGKNPMKAVGLAWAIGFPCGILLFILTKREVDKDRVKQMKARQNMRLSNTGEYESQRFRASSQSAPSPDVGSGVQT

SEQ ID NO: 391 - protein, 361 aa, Homo sapiens
MAWQGWPAAWQWVAGCWLLLVLVLVLLVSPRGCRARRGLRGLLMAHSQRLLFRIGYSLYTRTWLGYLFYRQQLRRARNRYPKGHSKTQPRLFNGVKVLPIPVLSDNYSYLIIDTQAQLAVAVDPSDPRAVQASIEKEGVTLVAILCTHKHWDHSGGNRDLSRRHRDCRVYGSPQDGIPYLTHPLCHQDVVSVGRLQIRALATPGHTQGHLVYLLDGEPYKGPSCLFSGDLLFLSGCGRTFEGNAETMLSSLDTVLGLGDDTLLWPGHEYAEENLGFAGVVEPENLARERKMQWVQRQRLERKGTCPSTLGEERSYNPFLRTHCLALQEALGPGPGPTGDDDYSRAQLLEELRRLKDMHKSK

SEQ ID NO: 392 - protein, 385 aa, Homo sapiens
MAAVVAATALKGRGARNARVLRGILAGATANKASHNRTRALQSHSSPEGKEEPEPLSPELEYIPRKRGKNPMKAVGLAWYSLYTRTWLGYLFYRQQLRRARNRYPKGHSKTQPRLFNGVKVLPIPVLSDNYSYLIIDTQAQLAVAVDPSDPRAVQASIEKEGVTLVAILCTHKHWDHSGGNRDLSRRHRDCRVYGSPQDGIPYLTHPLCHQDVVSVGRLQIRALATPGHTQGHLVYLLDGEPYKGPSCLFSGDLLFLSGCGRTFEGNAETMLSSLDTVLGLGDDTLLWPGHEYAEENLGFAGVVEPENLARERKMQWVQRQRLERKGTCPSTLGEERSYNPFLRTHCLALQEALGPGPGPTGDDDYSRAQLLEELRRLKDMHKSK

SEQ ID NO: 393 - protein, 325 aa, Homo sapiens
MPSSVHHTKRQMMSIYCYWYSLYTRTWLGYLFYRQQLRRARNRYPKGHSKTQPRLFNGVKVLPIPVLSDNYSYLIIDTQAQLAVAVDPSDPRAVQASIEKEGVTLVAILCTHKHWDHSGGNRDLSRRHRDCRVYGSPQDGIPYLTHPLCHQDVVSVGRLQIRALATPGHTQGHLVYLLDGEPYKGPSCLFSGDLLFLSGCGRTFEGNAETMLSSLDTVLGLGDDTLLWPGHEYAEENLGFAGVVEPENLARERKMQWVQRQRLERKGTCPSTLGEERSYNPFLRTHCLALQEALGPGPGPTGDDDYSRAQLLEELRRLKDMHKSK

SEQ ID NO: 394 - protein, 720 aa, Homo sapiens
MNNHVSSKPSTMKLKHTINPILLYFIHFLISLYTILTYIPFYFFSESRQEKSNRIKAKPVNSKPDSAYRSVNSLDGLASVLYPGCDTLDKVFTYAKNKFKNKRLLGTREVLNEEDEVQPNGKIFKKVILGQYNWLSYEDVFVRAFNFGNGLQMLGQKPKTNIAIFCETRAEWMIAAQACFMYNFQLVTLYATLGGPAIVHALNETEVTNIITSKELLQTKLKDIVSLVPRLRHIITVDGKPPTWSEFPKGIIVHTMAAVEALGAKASMENQPHSKPLPSDIAVIMYTSGSTGLPKGVMISHSNIIAGITGMAERIPELGEEDVYIGYLPLAHVLELSAELVCLSHGCRIGYSSPQTLADQSSKIKKGSKGDTSMLKPTLMAAVPEIMDRIYKNVMNKVSEMSSFQRNLFILAYNYKMEQISKGRNTPLCDSFVFRKVRSLLGGNIRLLLCGGAPLSATTQRFMNICFCCPVGQGYGLTESAGAGTISEVWDYNTGRVGAPLVCCEIKLKNWEEGGYFNTDKPHPRGEILIGGQSVTMGYYKNEAKTKADFFEDENGQRWLCTGDIGEFEPDGCLKIIDRKKDLVKLQAGEYVSLGKVEAALKNLPLVDNICAYANSYHSYVIGFVVPNQKELTELARKKGLKGTWEELCNSCEMENEVLKVLSEAAISASLEKFEIPVKIRLSPEPWTPETGLVTDAFKLKRKELKTHYQADIERMYGRK

SEQ ID NO: 395 - protein, 18 aa, Ensifer sp.
  misc_feature (1)..(1): Xaa can be any naturally occurring amino acid
XEQISKGRNTPLCDRWIL

SEQ ID NO: 396 - protein, 88 aa, Homo sapiens
MNNHVSSKPSTMKLKHTINPILLYFIHFLISLYTILTYIPFYFFSESRQEKSNRIKAKPVNSKPDSAYRSVNSLDGLASVLYPGCDTL

SEQ ID NO: 397 - protein, 95 aa, Homo sapiens
MNNHVSSKPSTMKLKHTINPILLYFIHFLISLYTILTYIPFYFFSESRQEKSNRIKAKPVNSKPDSAYRSVNSLDGLASVLYPGCDTLDKVFTYA

SEQ ID NO: 398 - protein, 141 aa, Homo sapiens
MLGQKPKTNIAIFCETRAEWMIAAQACFMYNFQLVTLYATLGGPAIVHALNETEVTNIITSKELLQTKLKDIVSLVPRLRHIITVDGKPPTWSEFPKGIIVHTMAAVEALGAKASMENQPHSKPLPSDIAVIMYTSGSTGL

SEQ ID NO: 399 - protein, 1084 aa, Homo sapiens
MSSQSHPDGLSGRDQPVELLNPARVNHMPSTVDVATALPLQVAPSAVPMDLRLDHQFSLPVAEPALREQQLQQELLALKQKQQIQRQILIAEFQRQHEQLSRQHEAQLHEHIKQQQEMLAMKHQQELLEHQRKLERHRQEQELEKQHREQKLQQLKNKEKGKESAVASTEVKMKLQEFVLNKKKALAHRNLNHCISSDPRYWYGKTQHSSLDQSSPPQSGVSTSYNHPVLGMYDAKDDFPLRKTASEPNLKLRSRLKQKVAERRSSPLLRRKDGPVVTALKKRPLDVTDSACSSAPGSGPSSPNNSSGSVSAENGIAPAVPSIPAETSLAHRLVAREGSAAPLPLYTSPSLPNITLGLPATGPSAGTAGQQDAERLTLPALQQRLSLFPGTHLTPYLSTSPLERDGGAAHSPLLQHMVLLEQPPAQAPLVTGLGALPLHAQSLVGADRVSPSIHKLRQHRPLGRTQSAPLPQNAQALQHLVIQQQHQQFLEKHKQQFQQQQLQMNKIIPKPSEPARQPESHPEETEEELREHQALLDEPYLDRLPGQKEAHAQAGVQVKQEPIESDEEEAEPPREVEPGQRQPSEQELLFRQQALLLEQQRIHQLRNYQASMEAAGIPVSFGGHRPLSRAQSSPASATFPVSVQEPPTKPRFTTGLVYDTLMLKHQCTCGSSSSHPEHAGRIQSIWSRLQETGLRGKCECIRGRKATLEELQTVHSEAHTLLYGTNPLNRQKLDSKKLLGSLASVFVRLPCGGVGVDSDTIWNEVHSAGAARLAVGCVVELVFKVATGELKNGFAVVRPPGHHAEESTPMGFCYFNSVAVAAKLLQQRLSVSKILIVDWDVHHGNGTQQAFYSDPSVLYMSLHRYDDGNFFPGSGAPDEVGTGPGVGFNVNMAFTGGLDPPMGDAEYLAAFRTVVMPIASEFAPDVVLVSSGFDAVEGHPTPLGGYNLSARCFGYLTKQLMGLAGGRIVLALEGGHDLTAICDASEACVSALLGNELDPLPEKVLQQRPNANAVRSMEKVMEIHSKYWRCLQRTTSTAGRSLIEAQTCENEEAETVTAMASLSVGVKPAEKRPDEEPMEEEPPL

SEQ ID NO: 400 - protein, 123 aa, Homo sapiens
MPSTVDVATALPLQVAPSAVPMDLRLDHQFSLPVAEPALREQQLQQELLALKQKQQIQRQILIAEFQRQHEQLSRQHEAQLHEHIKQQQEMLAMKHQQELLEHQRKLERHRQEQELEKQHREQ

SEQ ID NO: 401 - protein, 162 aa, Homo sapiens
MDVATALPLQVAPSAVPMDLRLDHQFSLPVAEPALREQQLQQELLALKQKQQIQRQILIAEFQRQHEQLSRQHEAQLHEHIKQQQEMLAMKHQQELLEHQRKLERHRQEQELEKQHREQKLQQLKNKEKGKESAVASTEVKMKLQEFVLNKKKALAHRNLNH

SEQ ID NO: 402 - protein, 175 aa, Homo sapiens
  misc_feature (1)..(1): Xaa can be any naturally occurring amino acid
XAWPCVSTPQPPVFLRCHETRFWAVLAAVLPRSHCSLPFPVAGFGYLTKQLMGLAGGRIVLALEGGHDLTAICDASEACVSALLGNELDPLPEKVLQQRPNANAVRSMEKVMEIHSKYWRCLQRTTSTAGRSLIEAQTCENEEAETVTAMASLSVGVKPAEKRPDEEPMEEEPPL

SEQ ID NO: 403 - protein, 148 aa, Homo sapiens
  misc_feature (1)..(1): Xaa can be any naturally occurring amino acid
XWLYLFPHPPHPPHCGSGLYLQSHHLQQAWIPHSACSSAPGSGPSSPNNSSGSVSAENGIAPAVPSIPAETSLAHRLVAREGSAAPLPLYTSPSLPNITLGLPATGPSAGTAGQQDAERLTLPALQQRLSLFPGTHLTPYLSTSPLER

SEQ ID NO: 404 - protein, 1089 aa, Homo sapiens
MSSQSHPDGLSGRDQPVELLNPARVNHMPSTVDVATALPLQVAPSAVPMDLRLDHQFSLPVAEPALREQQLQQELLALKQKQQIQRQILIAEFQRQHEQLSRQHEAQLHEHIKQQQEMLAMKHQQELLEHQRKLERHRQEQELEKQHREQKLQQLKNKEKGKESAVASTEVKMKLQEFVLNKKKALAHRNLNHCISSDPRYWYGKTQHSSLDQSSPPQSGVSTSYNHPVLGMYDAKDDFPLRKTASEPNLKLRSRLKQKVAERRSSPLLRRKDGPVVTALKKRPLDVTDSACSSAPGSGPSSPNNSSGSVSAENGIAPAVPSIPAETSLAHRLVAREGSAAPLPLYTSPSLPNITLGLPATGPSAGTAGQQDAERLTLPALQQRLSLFPGTHLTPYLSTSPLERDGGAAHSPLLQHMVLLEQPPAQAPLVTDWYLSGLGALPLHAQSLVGADRVSPSIHKLRQHRPLGRTQSAPLPQNAQALQHLVIQQQHQQFLEKHKQQFQQQQLQMNKIIPKPSEPARQPESHPEETEEELREHQALLDEPYLDRLPGQKEAHAQAGVQVKQEPIESDEEEAEPPREVEPGQRQPSEQELLFRQQALLLEQQRIHQLRNYQASMEAAGIPVSFGGHRPLSRAQSSPASATFPVSVQEPPTKPRFTTGLVYDTLMLKHQCTCGSSSSHPEHAGRIQSIWSRLQETGLRGKCECIRGRKATLEELQTVHSEAHTLLYGTNPLNRQKLDSKKLLGSLASVFVRLPCGGVGVDSDTIWNEVHSAGAARLAVGCVVELVFKVATGELKNGFAVVRPPGHHAEESTPMGFCYFNSVAVAAKLLQQRLSVSKILIVDWDVHHGNGTQQAFYSDPSVLYMSLHRYDDGNFFPGSGAPDEVGTGPGVGFNVNMAFTGGLDPPMGDAEYLAAFRTVVMPIASEFAPDVVLVSSGFDAVEGHPTPLGGYNLSARCFGYLTKQLMGLAGGRIVLALEGGHDLTAICDASEACVSALLGNELDPLPEKVLQQRPNANAVRSMEKVMEIHSKYWRCLQRTTSTAGRSLIEAQTCENEEAETVTAMASLSVGVKPAEKRPDEEPMEEEPPL

SEQ ID NO: 405 - protein, 320 aa, Homo sapiens
MVGYDPKPDGRNNTKFQVAVAGSVSGLVTRALISPFDVIKIRFQLQHERLSRSDPSAKYHGILQASRQILQEEGPTAFWKGHVPAQILSIGYGAVQFLSFEMLTELVHRGSVYDAREFSVHFVCGGLAACMATLTVHPVDVLRTRFAAQGEPKVYNTLRHAVGTMYRSEGPQVFYKGLAPTLIAIFPYAGLQFSCYSSLKHLYKWAIPAEGKKNENLQNLLCGSGAGVISKTLTYPLDLFKKRLQVGGFEHARAAFGQVRRYKGLMDCAKQVLQKEGALGFFKGLSPSLLKAALSTGFMFFSYEFFCNVFHCMNRTASQR

SEQ ID NO: 406 - protein, 263 aa, Homo sapiens
MVGYDPKPDGRNNTKFQVAVAGSVSGLVTRALISPFDVIKIRFQLQHERLSRSDPSAKYHGILQASRQILQEEGPTAFWKGHVPAQILSIGYGAVQVYNTLRHAVGTMYRSEGPQVFYKGLAPTLIAIFPYAGLQFSCYSSLKHLYKWAIPAEGKKNENLQNLLCGSGAGVISKTLTYPLDLFKKRLQVGGFEHARAAFGQVRRYKGLMDCAKQVLQKEGALGFFKGLSPSLLKAALSTGFMFFSYEFFCNVFHCMNRTASQR

SEQ ID NO: 407 - protein, 153 aa, Homo sapiens
MVGYDPKPDGRNNTKFQVAVAGSVSGLVTRALISPFDVIKIRFQLQHERLSRSDPSAKYHGILQASRQILQEEGPTAFWKGHVPAQILSIGYGAVQFLSFEMLTELVHRGSVYDAREFSVHFVCGGLAACMATLTVHPVDVLRTRFAAQGEPK

SEQ ID NO: 408 - protein, 106 aa, Homo sapiens
MVGYDPKPDGRNNTKFQVAVAGSVSGLVTRALISPFDVIKIRFQLQHERLSRSDPSAKYHGILQASRQILQEEGPTAFWKGHVPAQILSIGYGAVQFLSFEMLTEL

SEQ ID NO: 409 - protein, 67 aa, Homo sapiens
  misc_feature (1)..(1): Xaa can be any naturally occurring amino acid
XKFQVAVAGSVSGLVTRALISPFDVIKIRFQLQHERLSRSDPSAKYHGILQGSPHERIRGNAGRGLW

SEQ ID NO: 410 - protein, 85 aa, Homo sapiens
MVGYDPKPDGRNNTKFQVAVAGSVSGLVTRALISPFDVIKIRFQLQHERLSRSDPSAKYHGILQASRQILQEEGPTAFWKGHVPA

SEQ ID NO: 411 - protein, 84 aa, Homo sapiens
MLTELVHRGSVYDAREFSVHFVCGGLAACMATLTVHPVDVLRTRFAAQGEPKVYNTLRHAVGTMYRSEGPQVFYKGLAPTLIAI

SEQ ID NO: 412 - protein, 39 aa, Homo sapiens
MVGYDPKPDGRNNTKFQVAVAGSVSGLVTRALISPFDVI

SEQ ID NO: 413 - protein, 182 aa, Homo sapiens
MVGYDPKPDGRNNTKFQVAVAGSVSGLVTRALISPFDVIKIRFQLQHERLSRSDPSAKYHGILQASRQILQEEGPTAFWKGHVPAQILSIGYGAVQFLSFEMLTELVHRGSVYDAREFSVHFVCGGLAACMATLTVHPVDVLRTRFAAQGEPKVRRYKGLMDCAKQVLQKEGALGFFKGLSP

SEQ ID NO: 414 - protein, 151 aa, Homo sapiens
MVGYDPKPDGRNNTKFQVAVAGSVSGLVTRALISPFDVIKIRFQLQHERLSRSDPSAKYHGILQASRQILQEEGPTAFWKGHVPAQILSIGYGAVQFLSFEMLTELVHRGSVYDAREFSVHFVCGGLAACMATLTVHPVDVLRTRFAAQGE
